(19) United States
(12) Patent Application Publication
(10) Pub. No.: US 2023/0045048 A1
(43) Pub. Date: Feb. 9, 2023

(54) IL-15 COMPOSITIONS AND METHODS OF USE THEREOF

(71) Applicant: PROVIVA THERAPEUTICS (HONG KONG) LIMITED, Hong Kong (CN)

(72) Inventor: Zijuan LI, Shanghai (CN)

(21) Appl. No.: 17/413,786

(22) PCT Filed: Dec. 13, 2019
(86) PCT No.: PCT/US2019/066287

§ 371 Date: Jun. 14, 2021

Related U.S. Application Data
(60) Provisional application No. 62/779,793, filed on Dec. 14, 2018.

(51) Int. Cl. C07K 14/54; C07K 14/715

(52) U.S. Cl. CPC C07K 14/5443; C07K 14/7155; A61K 38/00; C07K 2319/50; C07K 2319/30

(57) ABSTRACT

Provided are compositions comprising an activatable proprotein comprising a first IL-15 or a variant thereof and a second IL-15Rα or variant thereof fused to a masking moiety comprising an antibody Fc region, and methods of using the same for cancer immunotherapy and other therapies.

### CROSS-REFERENCE TO RELATED APPLICATIONS

[0001] This application claims priority under 35 U.S.C. § 119(e) to U.S. Application No. 62/779,793, filed Dec. 14, 2018, which is incorporated by reference in its entirety.

### STATEMENT REGARDING SEQUENCE LISTING

[0002] The Sequence Listing associated with this application is provided in text format in lieu of a paper copy, and is hereby incorporated by reference into the specification. The name of the text file containing the Sequence Listing is VIVA_001_01WO_ST25.txt. The text file is about 1,733 KB, created on Dec. 14, 2019, and is being submitted electronically via EFS-Web.

### BACKGROUND OF THE INVENTION

[0003] IL-15 is a pleiotropic cytokine that has been demonstrated to induce and regulate a myriad of immune functions. In particular, IL-15 is critical for lymphoid development and peripheral maintenance of innate immune cells and immunological memory of T cells, specifically natural killer (NK) and CD8+ T cell populations. However, while IL-15 does not promote the maintenance of CD4+CD25+FOXP3+ regulatory T cells (Tregs), IL-2 has been demonstrated to induce their development and IL-15 has been shown to protect effector T cells from IL-2-mediated activation-induced cell death (AICD). For these reasons, IL-15 has long been speculated to have high therapeutic potential for long-term anti-tumor immunity. IL-15 is a four-α-helix protein belonging to a family of cytokines consisting of interleukins IL-2, IL-4, IL-7, IL-9, and IL-21. IL-15 signals through a receptor complex composed of the IL-2/IL-15 receptor β (IL-15Rβ) (CD122) subunit, which is shared with IL-2 and the common gamma chain (γC) (CD132) receptor subunit, which is also utilized by all of the additional family members. While it does not have a crucial direct role in IL-15 signaling per se, IL-15Rα is a critical component of the IL-15 cytokine-receptor complex. IL-15Rα is a transmembrane protein with very high affinity for IL-15 that facilitates IL-15 trafficking from the endoplasmic reticulum (ER) through the cytoplasm and presentation of IL-15/IL-15Rα complexes on the cell surface. In addition to remaining associated throughout cytoplasmic and cell surface expression, IL-15/IL-15Rα can also be cleaved as a complex into the extracellular space.

[0004] Once expressed on the cell surface, IL-15/IL-15Rα complexes can stimulate neighboring or opposing cells in trans through IL-15Rβ/γC. This type of cytokine stimulation requires cell-cell contact and is referred to as transpresentation. Under steady-state conditions, trans-presentation is believed to be the primary mode of action for IL-15-mediated development and homeostasis of CD8 T cells, NK cells, NKT cells and intraepithelial lymphocytes. Trans-presentation offers a tighter regulation than that of a secreted cytokine by providing cell-directed delivery of IL-15 to specific cell types. Nevertheless, soluble (s) IL-15/IL-15Rα complexes are also cleaved from the cell surface in response to a variety of inflammatory signals, such as TLR ligation, type I Interferons, and CD40 ligation. This production of sIL-15 complexes is generally transient in nature and may provide a short-lived, but strong burst of IL-15 activity to support early immune responses. In both of these circumstances, IL-15Rα binding of IL-15 is not only a platform for IL-15 delivery but also increases the half-life of IL-15 and may also increase the affinity of IL-15 for IL-15Rβ/γC. Indeed, sIL-15 complexes have been found to be superior in their ability to stimulate IL-15 responses compared to unassociated rIL-15. This garnered a lot of interest in IL-15 and sparked the generation of multiple formulations of sIL-15 complexes that are now being examined for therapeutic efficacy.

[0005] The immune effect of IL-15 in cancer patients has been examined and has been demonstrated to induce the expansion of NK cells and significantly increased the proliferation of γδT cells and CD8+ T cells following administration in humans.

[0006] Despite its promising anti-tumor immune capacity, IL-15 has been shown to exhibit a short half-life and high doses were required to achieve biological responses in vivo, thereby resulting in clinical toxicities and limited anti-tumor responses in patients. To increase the therapeutic effectiveness and facilitate the use of IL-15 in the immunotherapy of cancer and chronic infection, several companies are currently developing IL-15 and IL-15 derivatives, However, major drawbacks of the mentioned drug candidates exist: (1) high serum Cmax initially causing over-activation of immune system; (2) short PK due to either small molecular size for IL-15 (13-14 kD) or catabolism by the large number of immune cells expressing IL-15 receptors for IL-15 or IL-15 Fc fusion proteins; (3) poor accumulation in the target tumor due to short PK, lack of or ineffective tumor targeting; and (4) undesirable accumulation and immune activation activities in normal tissues.

[0007] The present invention solves all of the problems mentioned above by providing an activatable proprotein comprising interleukin 15 (IL-15) that is activated within a cancer tissue or tumor. This platform has the potential to address the drawbacks of IL-15 and its derivatives currently being developed for cancer immunotherapy.

### SUMMARY OF THE INVENTION

[0008] In one aspect, the invention relates to an activatable proprotein comprising a first polypeptide and a second polypeptide, wherein the first and second polypeptide each comprise a masking moiety operably linked via a first linker on the C-terminus to an IL-15 or variant thereof, wherein the IL-15 or variant thereof is linked via a second linker on the C-terminus to an IL-15Rα or variant thereof, and wherein the masking moiety masks the active portion of the proprotein.

[0009] In one aspect, the invention relates to an activatable proprotein comprising a first polypeptide and a second polypeptide, wherein the first and second polypeptide each comprise an IL-15 or variant thereof operably linked via a first linker on the C-terminus to an IL-15Rα or variant thereof, wherein the IL-15Rα or variant thereof is linked via a second linker on the C-terminus to a masking moiety present on each of the first and second polypeptides, and wherein the masking moiety masks the active portion of the proprotein.

[0010] In a related aspect, the first linker on the first or second polypeptide, or on both the first and the second polypeptide is a cleavable linker. In another related aspect, the second linker on the first or second polypeptide, or on both the first and the second polypeptide is a cleavable linker.

[0011] In a related aspect, the IL-15 or variant thereof and the IL-15Rα or variant thereof in the first polypeptide and the IL-15 or variant thereof and the IL-15Rα or variant thereof in the second polypeptide comprise one or more Cys substitution mutations.

[0012] In another related aspect, the IL-15 or variant thereof in the first polypeptide comprising one or more Cys substitution mutations forms a disulfide bond with the IL-15Rα or variant thereof comprising one or more Cys substitution mutations in the second polypeptide. In another embodiment, the IL-15 or variant thereof in the second polypeptide comprising one or more Cys substitution mutations forms a disulfide bond with the IL-15Rα or variant thereof comprising one or more Cys substitution mutations in the first polypeptide.

[0013] In a related aspect, the proprotein is a dimeric proprotein. In another related aspect, the dimeric proprotein comprises a first polypeptide and a second polypeptide each comprising from N-terminus to C-terminus the masking moiety linked via the first linker to the IL-15 or variant thereof, wherein the IL-15 or variant thereof is linked via the second linker to the IL-15Rα or variant thereof, and wherein the masking moiety of the first polypeptide forms covalent disulfide bond or non-covalent bond is fused to the masking moiety of the second polypeptide. In another related aspect, the dimeric proprotein comprises a first polypeptide and a second polypeptide each comprising from N-terminus to C-terminus the masking moiety linked via the first linker to the IL-15 or variant thereof, wherein the IL-15 or variant thereof is linked via the second linker to the IL-15Rα or variant thereof, and wherein the masking moiety of the first polypeptide forms one or more disulfide bonds or non-covalent bonds with the masking moiety of the second polypeptide. In one embodiment, the dimeric proprotein comprises significantly reduced biological activity in comparison to native IL-15. In another embodiment, the dimeric protein is activatable through protease cleavage to restore the activity of the IL-15 or variant thereof present in the dimeric proprotein.

[0014] In a related aspect, provided is a recombinant nucleic acid molecule encoding an activatable proprotein disclosed herein. In another related aspect, provided is a vector comprising the recombinant nucleic acid molecule encoding an activatable proprotein.

[0015] In a related aspect, provided is a pharmaceutical composition comprising the activatable proprotein disclosed herein, and a pharmaceutically acceptable carrier.

[0016] In another aspect, the invention relates to a method comprising the step of administering the activatable proprotein or the pharmaceutical composition comprising the activatable proprotein disclosed herein to a subject having a cancer to treat the cancer in the subject, wherein following administration, the activatable proprotein is activated through protease cleavage in a cancerous tissue. In another embodiment, the activatable proprotein is activated following or after protease cleavage in a cancerous tissue.

[0017] In a related aspect, the invention relates to a method comprising the step of administering the activatable proprotein or the pharmaceutical composition comprising the activatable proprotein disclosed herein to a subject in need thereof, to elicit or enhance an anti-tumor immune response in the subject, wherein following administration, the activatable proprotein is activated through protease cleavage in the tumor. In another embodiment, the activatable proprotein is activated following or after protease cleavage in the tumor.

[0018] In another aspect, the invention relates to a use of the activatable proprotein or the pharmaceutical composition comprising the activatable proprotein disclosed herein for treating a cancer in a subject, comprising the step of administering the activatable proprotein or pharmaceutical composition comprising the same, and wherein following administration, the activatable proprotein is activated through protease cleavage in a cancerous tissue.

[0019] In another aspect, the invention relates to a use of the activatable proprotein or the pharmaceutical composition comprising the activatable proprotein disclosed herein for eliciting or enhancing an anti-tumor immune response in a subject, comprising the step of administering the activatable proprotein or pharmaceutical composition, and wherein following administration, the activatable proprotein is activated through protease cleavage in a tumor.

[0020] In another embodiment of the methods or uses disclosed herein, the protease cleavage partially or completely removes the masking moiety in the activatable proprotein such that the IL-15/IL-IL-15Rα complex in the first and the second polypeptide can bind IL-15Rβ/γC present on the surface of a lymphocyte of blood cell in vitro or in vivo.

[0021] Other features and advantages of the present invention will become apparent from the following detailed description examples and figures. It should be understood, however, that the detailed description and the specific examples while indicating embodiments of the invention are given by way of illustration only, since various changes and modifications within the spirit and scope of the invention will become apparent to those skilled in the art from this detailed description.

### BRIEF DESCRIPTION OF THE DRAWINGS

[0022] Various objects and advantages and a more complete understanding of the present invention are apparent and more readily appreciated by reference to the following Detailed Description and to the appended claims when taken in conjunction with the accompanying Drawing wherein:

[0023] FIG. 1A shows the protein topology of human interleukin 15 (IL-15) and human interleukin 15 receptor alpha chain (IL-15Rα)

[0024] FIG. 1B shows human_IL-15_LSP: Amino acid sequences of IL-15 with long signal peptide (1-162); human_IL-15_mature: Amino acid sequences of IL-15 without signal peptide (49-162); human_IL-15Rα_FL: full length sequence of IL-15Rα with signal peptide underlined (1-267); human_IL-15Rα-ECD: extracellular domain sequence of IL-15Rα (31-205); human_IL-15Rα-sushi+: extracellular sushi domain sequence plus the first 13 amino acids from the linker region (31-98); human_IL-15Rα-sushi: extracellular sushi domain sequence (31-85).

[0025] FIG. 1C shows quaternary structure of IL-15 in complex with its receptors IL-15Rα (CD215), IL-15Rβ (CD122) and the common gamma chain (CD132) (PDB:4GS7) with schematic drawing of cell membrane and transmembrane and signaling domains of the receptors.

[0026] FIG. 1D illustrates a schematic diagram of IL-15 and cell surface IL-15 receptor complex.

[0027] FIG. 2A illustrates the IL-15 complex with its receptor IL-15Rα-sushi (PDB:2Z3Q) with an artificial flexible peptide linker between the C-terminus of IL-15 and N-terminus of IL-15Rα-sushi (to form an ILR)). The interaction site on IL-15 in ILR with its signaling IL-15Rβ/γc receptors is indicated at IL-15Rβ/γc Interaction interface.

[0028] FIG. 2B illustrates a homodimeric association of ILR fusion proteins described in FIG. 2A. The interaction sites on IL-15 in the homodimeric ILR with its signaling IL-15Rβ/γc receptors is indicated at IL-15Rβ/γc Interaction interface. Unlike an RLI fusion protein, ILR fusion protein favors homodimer formation.

[0029] FIG. 2C illustrates a schematic diagram of ILR structure described in FIG. 2A. IL-15 in the ILR is able to bind to and signal through IL-15Rβ/γc receptors.

[0030] FIG. 2D illustrates a schematic diagram of a dimeric ILR structure described in FIG. 2B. IL-15 in the dimeric ILR is able to bind to and signal through IL-15Rβ/γc receptors.

[0031] FIG. 3A illustrates a fusion of the C-terminus of an ILR (described in FIG. 2B) to the N-terminus of a fusion moiety. Similar to the structure described in FIG. 2B, this fusion also favors a dimer formation. The interaction sites on IL-15 in the homodimeric ILR with its signaling IL-15Rβ/γc receptors is indicated at IL-15Rβ/γc Interaction interface.

[0032] FIG. 3B illustrates a schematic diagram of a dimeric fusion structure described in FIG. 3A. IL-15 in the dimeric ILR is able to bind to and signal through IL-15Rβ/γc receptors. IL-15 in this dimeric fusion is able to bind to and signal through IL-15Rβ/γc receptors.

[0033] FIG. 3C illustrates a diagram of the protein sequence motifs and configurations for proteins described in FIGS. 3A and 3B.

[0034] FIG. 3D illustrates a fusion of the N-terminus of an ILR (described in FIG. 2B) to the C-terminus of a fusion moiety (a masking moiety). Similar to the structure described in FIG. 2B, this fusion also favors a dimer formation. The interaction sites on IL-15 in the homodimeric ILR with its signaling IL-15Rβ/γc receptors is indicated at IL-15Rβ/γc Interaction interface.

[0035] FIG. 3E illustrates a schematic diagram of a dimeric fusion structure described in FIG. 3D. IL-15 in the dimeric ILR is able to bind to and signal through IL-15Rβ/γc receptors. IL-15 in this dimeric fusion is not able to bind to and signal through IL-15Rβ/γc receptors because of the steric hindrance resulted from the masking moiety and the linkers between the ILR and the masking moiety.

[0036] FIG. 3F illustrates a diagram of the protein sequence motifs and configurations for proteins described in FIGS. 3D and 3E.

[0037] FIG. 3G illustrates a schematic diagram of a dimeric fusion structure with a protein domain at the C-terminal of IL-15Rα on the first polypeptide.

[0038] FIG. 3H illustrates a diagram of the protein sequence motifs and configurations for proteins described in FIG. 3G.

[0039] FIG. 3I illustrates a schematic diagram of a dimeric fusion structure with a protein domain at the C-terminal of IL-15Rα on the second polypeptide.

[0040] FIG. 3J illustrates a diagram of the protein sequence motifs and configurations for proteins described in FIG. 3I.

[0041] FIG. 3K illustrates a schematic diagram of a dimeric fusion structure with a protein domain at the C-terminal of IL-15Rα on the first and second polypeptides.

[0042] FIG. 3L illustrates a diagram of the protein sequence motifs and configurations for proteins described in FIG. 3K.

[0043] FIG. 4A illustrates a diagram of the protein sequence motifs and configurations similar but not limited to what was described in FIG. 3F. Any one of more of the protein sequence motifs in the first polypeptide diagram can be different from the corresponding motifs in the second polypeptide as indicated by the double headed arrows. The linker sequence indicated in the diagram can be a flexible and protease cleavable or a flexible and protease non-cleavable or combination of them.

[0044] FIG. 4B illustrates examples of masking motifs in the first and second polypeptides. The masking motif in the first polypeptide can be the same or different than the masking motif in the second polypeptide. The masking motif from the first polypeptide can either form non-covalent interaction or covalent interaction or both covalent and non-covalent interaction with the masking motif in the second polypeptide.

[0045] FIGS. 4C-4D illustrate examples of Fab-CH2CH3 (4C) and Fab-Cys-CH2CH3 (4D) as masking moieties in polypeptide fusion with ILR.

[0046] FIGS. 4E-4F illustrate examples of CH2CH3 (4E) and Cys-CH2CH3 (4F) as masking moieties in polypeptide fusion with ILR.

[0047] FIGS. 4G-4H show examples of CH3 (4G) and Cys-CH3 (4H) as masking moieties in polypeptide fusion with ILR.

[0048] FIGS. 4I-4J show examples of VH-CH1 and VL-CL (4I) and VH-CH1-Cys and VL-CL-Cys (4J) as masking moieties in polypeptide fusion with ILR

[0049] FIGS. 4K-4L show examples of heterodimeric CH2CH3 (4K) and heterodimeric Cys-CH2CH3 (4L) as masking moieties in polypeptide fusion with ILR

[0050] FIGS. 4M-4N show examples of Leucine zipper (Coiled coil) (4M) and Cys-leucine zipper (Coiled coil) (4N) as masking moieties in polypeptide fusion with ILR

[0051] FIG. 4O shows examples of Cys containing flexible peptide (4O) as masking moieties in polypeptide fusion with ILR.

[0052] FIG. 5 shows schematic diagram of dimeric Cys-CH2-CH3-ILR. Lack of IL15 signaling activity through IL15Rβ/γc receptors suggests that inter-chain association of IL15 and IL15R is more favorable than the intra-chain association of IL15 and IL15R resulting in the masking of the IL15Rβ/γc interaction site on IL15.

[0053] FIG. 6 shows a schematic diagram of activation of dimeric Cys-CH2-CH3-ILR through protease cleavage of the substrate linker sequences in the fusion polypeptide. Example of protease substrate sequence for linker 1 and linker 3 is shown. Digestion of one of the protease substrate sequences (partial digestion) in the linkers releases the steric hindrance imposed by the masking moiety, therefore allow the IL-15 in the fusion to bind to and signal through IL15Rβ/γc receptors. Digestion of the both cleavable linkers releases the ILR from the Fc fusion resulting in full activity of the ILR towards the IL15Rβ/γc receptors.

[0054] FIG. 7 shows a schematic diagram of activation of dimeric Cys-CH2-CH3-ILR through protease cleavage of the substrate linker sequences in the fusion polypeptide. Example of protease substrate sequence for linker 2 and linker 4 is shown. Digestion of one of the two protease substrate sequences in the linkers does not effectively release the steric hindrance imposed by the masking moiety. Therefore full digestion of both protease linkers is necessary to activate the fusion polypeptide signaling through IL15Rβ/γc receptors.

[0055] FIG. 8 shows a sequence identifier for exemplary fusion proteins.

[0056] FIGS. 9A-9F show representative SDS-PAGE results of purified proteins. “M” on the figures represents a protein standard marker.

[0057] FIGS. 10A-10G illustrate representative HPLC analysis results of purified proteins.

[0058] FIGS. 11A-11B illustrate representative fluorescence assisted cell sorting (FACS) gating and dot plot of pSTAT5 cell signaling activity of IL-15 fusion protein P1185.

[0059] FIGS. 11C-11D illustrate cell signaling activity of IL-15 fusion proteins, as measured by pSTAT5 FACS assay.

[0060] FIGS. 12A-12C illustrate representative FACS gating of IL-15 stimulated sample in cell signaling assay using human whole blood.

[0061] FIGS. 12D-12F illustrate cell signaling activity of IL-15 fusion proteins using human whole blood, as measured by pSTAT5 FACS assay.

[0062] FIGS. 13A-13H illustrate activity of IL15 fusion proteins on M-07e proliferation determined by a colorimetric assay (Cell Counting Kit-8 (CCK-8)).

[0063] FIG. 14A illustrates representative gating of lymphocytes on side scatter (SSC) and forward scatter (FSC) for IL-15 stimulated samples.

[0064] FIGS. 14B-14F illustrate human PBMC proliferation assay results for IL-15 fusion proteins.

[0065] FIGS. 15A-15I illustrate protease (TEV) cleavage of IL-15 fusion proteins. “M” on the figures represents a protein standard maker.

[0066] FIGS. 16A-16G illustrate cleavage of IL-15 fusion proteins with uPA, matriptase, legumain, MMP-2 and MMP-9. M represents the protein standard marker; B represents the sample before protease cleavage; uPA represents for uPA protease; Mat represents matriptase protease; L represents legumain protease; M-2 represents MMP-2 protease; M-9 represents MMP-9 protease. Red-arrowed band: uncleaved protein; pink-arrowed band: Fc/Fc-L15R; yellow arrowed band: Fc dimer; green arrowed band: L15R.

[0067] FIGS. 17A-17B illustrate cell signaling activity of IL15 fusion proteins, as measured by a pSTAT5 FACS assay.

[0068] FIGS. 18A-18I show activity of IL15 fusion proteins on M-07e proliferation determined by a colorimetric assay (Cell Counting Kit-8 (CCK-8)).

[0069] FIGS. 19A-19D show human PBMC proliferation assay results of IL-15 fusion protein P1256 with and without TEV protease cleavage. P1185 was used as positive control. P1256 digested represents for P1256 protein digested by TEV protease at TEV to protein ratio of 1 to 2 at 37° C. for overnight. P1256+TEV 1-2 represents for P1256 mixed with TEV at TEV to protein ratio of 1 to 2 for proliferation assay. Cell culture medium was used in TEV digestion reactions.

[0070] FIGS. 20A-20F show protease (TEV) cleavage of IL-15 fusion proteins. “M” represents a protein standard marker; B represents the protein sample prior to TEV cleavage; A represents the protein sample after TEV cleavage.

[0071] FIG. 21 shows cell signaling activity of IL15 fusion proteins, as measured by a pSTAT5 FACS assay.

[0072] FIGS. 22A-22F show the activity of IL15 fusion proteins on M-07e proliferation, as determined by a colorimetric assay (Cell Counting Kit-8 (CCK-8)).

[0073] FIGS. 23A-23F show reduced SDS-PAGE results of purified proteins. “M” on the figures represents the protein standard marker.

[0074] FIGS. 24A-24F show non-reduced SDS-PAGE results of purified proteins. “M” on the figures represents the protein standard marker.

[0075] FIGS. 25A-25X illustrate representative HPLC analysis results of purified proteins.

[0076] FIGS. 26A-26P show SDS-PAGE results of cleavage of IL-15 fusion proteins. “M” on the figures represents the protein standard marker. “B” represents for protein before protease cleavage. “B-4” represents for protein before cleavage and store at 4 degree. “B-37” represents for protein before cleavage and store at 37 degree. “uPA” represents for uPA protease. “Mat” represents for matriptase protease. “L” represents for legumain protease. “M-2” represents for MMP-2 protease. “M-9” represents for MMP-9 protease. “K5” represents for KLK-5 protease. “K7” represents for KLK-7 protease.

[0077] FIGS. 27A-27N and FIGS. 28A-28W show activity of IL-15 fusion proteins on M-07e proliferation determined by a colorimetric assay (Cell Counting Kit-8 (CCK-8)).

[0078] FIGS. 29A-29F illustrate representative results of in vitro serum stability. Western blot was probed by biotinylated anti-IL-15 antibody and subsequently with streptavidin-HRP. FIG. 29A: in vitro stability of P1482 in human serum. FIG. 29B: in vitro stability of P1482 in mouse serum. FIG. 29C: in vitro protein stability in human serum at the time point of 164 h. FIG. 29D: in vitro protein stability in mouse serum at the time point of 96 h. FIG. 29E: in vitro protein stability in rat serum at the time point of 96 h. FIG. 29F: in vitro protein stability in cyno serum at the time point of 96 h.

[0079] FIGS. 30A-30B show SDS-PAGE results of purified proteins. FIG. 30A shows reduced SDS-PAGE results and 30B shows non-reduced SDS-PAGE results. “M” on the figures represents the protein standard marker.

[0080] FIGS. 31A-31F illustrate representative HPLC analysis results of purified proteins.

[0081] FIG. 32 shows SDS-PAGE results of cleavage of IL-15 fusion proteins. “M” on the figures represents the protein standard marker. “B” represents for protein before protease cleavage. “uPA” represents for uPA protease. “Mat” represents for matriptase protease. “L” represents for legumain protease. “M-2” represents for MMP-2 protease. “K5” represents for KLK-5 protease. “K7” represents for KLK-7 protease.

[0082] FIGS. 33A-33J show activity of IL-15 fusion proteins on M-07e proliferation determined by a colorimetric assay (Cell Counting Kit-8 (CCK-8)).

[0083] FIGS. 34A-34B illustrates representative results of in vitro serum stability. Western blot was probed using HRP-anti-human IgG antibody. FIG. 34A: in vitro stability of P18121450 in mouse serum. FIG. 34B: in vitro stability of P18121450 in rat serum.

### DETAILED DESCRIPTION

[0084] The current invention provides activatable proproteins comprising a masking moiety and an active portion, which is also interchangeably referred to herein as an “active domain”, wherein the active domain comprises a complex of IL-15/IL-15Rα. The invention further provides compositions comprising the same and methods of administering or using the same for preventing or treating a tumor or cancer.

### Definitions

[0085] Unless defined otherwise, technical and scientific terms used herein have the same meaning as commonly understood by one of ordinary skill in the art to which this invention belongs.

[0086] For purposes of interpreting this specification, the following definitions will apply and whenever appropriate, terms used in the singular will also include the plural and vice versa. In the event that any definition set forth below conflicts with any document incorporated herein by reference, the definition set forth below shall control.

[0087] The term “active,” as used herein, refers to a portion, domain or fragment having a biological activity or biological function. In one embodiment, the term “active domain” or “active portion” are used interchangeably herein within the context of an activatable protein disclosed herein. In some embodiments, the activity is equal to or approximates the activity of the wild-type protein. Hence, an active domain of an activatable proprotein, comprising an IL-15/IL-15Rα complex as described herein, is expected to have equal activity or approximates the activity of the wild-type IL-15/IL-15Rα complex whether in soluble form or when bound to a cell surface.

[0088] The term “subject” as used herein includes, but is not limited to, a mammal, including, e.g., a human, non-human primate (e.g., monkey), mouse, pig, cow, goat, rabbit, rat, guinea pig, hamster, horse, monkey, sheep, or other non-human mammal, a non-mammal, including, e.g., a non-mammalian vertebrate, such as a bird (e.g., a chicken or duck) or a fish; and a non-mammalian invertebrate. In some embodiments, the methods and compositions of the invention are used to treat (both prophylactically and/or therapeutically) non-human animals.

[0089] The term “pharmaceutical composition” herein means a composition suitable for pharmaceutical use in a subject, including an animal or human. A pharmaceutical composition generally comprises an effective amount of an active agent (e.g., the activatable proprotein provided herein) and a pharmaceutically acceptable carrier (e.g., a buffer, adjuvant, or the like).

[0090] The term “effective amount” means a dosage or amount sufficient to produce a desired result. The desired result may comprise an objective or subjective improvement in the recipient of the dosage or amount (e.g., long-term survival, decrease in number and/or size of tumors, effective prevention of a disease state, etc.).

[0091] A “prophylactic treatment” is a treatment administered to a subject who does not display signs or symptoms of a disease, pathology, or medical disorder, or displays only early signs or symptoms of a disease, pathology, or disorder, such that treatment is administered for the purpose of diminishing, preventing, or decreasing the risk of developing the disease, pathology, or medical disorder. A prophylactic treatment functions as a preventative treatment against a disease or disorder. A “prophylactic activity” is an activity of an agent, such as the activatable proprotein disclosed herein, or composition thereof, that, when administered to a subject who does not display signs or symptoms of a pathology, disease or disorder (or who displays only early signs or symptoms of a pathology, disease, or disorder) diminishes, prevents, or decreases the risk of the subject developing the pathology, disease, or disorder. A “prophylactically useful” agent or compound (e.g., an activatable proprotein provided herein) refers to an agent or compound that is useful in diminishing, preventing, treating, or decreasing development of a pathology, disease or disorder.

[0092] A “therapeutic treatment” is a treatment administered to a subject who displays symptoms or signs of pathology, disease, or disorder, in which treatment is administered to the subject for the purpose of diminishing or eliminating those signs or symptoms of pathology, disease, or disorder. A “therapeutic activity” is an activity of an agent, such an activatable proprotein provided herein, or a composition thereof, that eliminates or diminishes signs or symptoms of a pathology, disease or disorder, when administered to a subject suffering from such signs or symptoms. A “therapeutically useful” agent or compound (e.g., an activatable proprotein provided herein) indicates that an agent or compound is useful in diminishing, treating, or eliminating such signs or symptoms of the pathology, disease or disorder.

[0093] The term “treating” as used herein, unless otherwise indicated, means reversing, alleviating, or reducing the reoccurrence of, either partially or completely, the growth of tumors, tumor metastases, or other cancer-causing or neoplastic cells in a patient. The term “treatment” as used herein, unless otherwise indicated, refers to the act of treating a disease, such as a cancer or tumor.

[0094] The term “preventing” as used herein, unless otherwise indicated, means inhibiting the progress of, delaying the onset of, or reducing the occurrence of, either partially or completely, the growth of tumors, tumor metastases, or other cancer-causing or neoplastic cells in a patient. The term “preventing” as used herein, unless otherwise indicated, refers to the act of preventing a disease, such as a cancer or tumor.

[0095] The terms “identical” or “percent identity,” in the context of two or more nucleic acids or polypeptide sequences, refer to two or more sequences or subsequences that are the same or have a specified percentage of nucleotides or amino acid residues that are the same, when compared and aligned for maximum correspondence. To determine the percent identity, the sequences are aligned for optimal comparison purposes (e.g., gaps can be introduced in the sequence of a first amino acid or nucleic acid sequence for optimal alignment with a second amino or nucleic acid sequence). The amino acid residues or nucleotides at corresponding amino acid positions or nucleotide positions are then compared. When a position in the first sequence is occupied by the same amino acid residue or nucleotide as the corresponding position in the second sequence, then the molecules are identical at that position. The percent identity between the two sequences is a function of the number of identical positions shared by the sequences (i.e., % identity=# of identical positions/total # of positions (e.g., overlapping positions)×100). In some embodiments, the two sequences are the same length.

[0096] The term “substantially identical,” in the context of two nucleic acids or polypeptides, refers to two or more sequences or subsequences that have at least 90%, at least 91%, at least 92%, at least 93%, at least 94%, at least 95%, at least 96%, at least 97%, at least 98% identity, or at least 99% identity (e.g., as determined using one of the methods set forth infra).

[0097] As used herein, the term “binds,” “specifically binds to,” or is “specific for” refers to measurable and reproducible interactions such as binding between a target and an antibody, which is determinative of the presence of the target in the presence of a heterogeneous population of molecules including biological molecules. For example, an antibody that specifically binds to a target (which can be an epitope) is an antibody that binds this target with greater affinity, avidity, more readily, and/or with greater duration than it binds to other targets. In one embodiment, the extent of binding of an antibody to an unrelated target is less than about 10% of the binding of the antibody to the target as measured, for example, by a radioimmunoassay (RIA). In certain embodiments, an antibody that specifically binds to a target has a dissociation constant (Kd) of <1 μM, <100 nM, <10 nM, <1 nM, or <0.1 nM.

[0098] As used in this specification, the singular forms “a”, “an”, and “the” include plural references unless the context clearly dictates otherwise. Reference to “the formulation” or “the method” includes one or more formulations, methods, and/or steps of the type described herein and/or which will become apparent to those persons skilled in the art upon reading this disclosure.

[0099] The terms “activatable proprotein,” “activatable prodrug”, “prodrug” or “proprotein” are used interchangeably herein and refer to an activatable proprotein comprising at least a masking moiety and an active domain, or derivatives/variants therefrom, as described herein. In one embodiment, the proprotein may also comprise one or more protein domains.

[0100] The term “polypeptide” refers, in one embodiment, to a polymer of amino acids and its equivalent and does not refer to a specific length of a product; thus, “peptides” and “proteins” are included within the definition of a polypeptide. Also included within the definition of polypeptides are “masking moieties” as defined herein. A “polypeptide region” refers to a segment of a polypeptide, which segment may contain, for example, one or more domains or motifs (e.g., a polypeptide region of an antibody can contain, for example, one or more constant domains). The term “fragment” refers to a portion of a polypeptide preferably having at least 10 contiguous amino acids of the polypeptide. In another embodiment, the term refers to a portion of a polypeptide having least 20, 30, 40, 50, 60, or 70 contiguous amino acids of the polypeptide.

[0101] Unless otherwise indicated by context, a “derivative” is a polypeptide or fragment thereof having one or more non-conservative or conservative amino acid substitutions relative to another polypeptide (also referred to as a “variant”); or a polypeptide or fragment thereof that is modified by covalent attachment of another molecule such as, e.g., by attachment of a heterologous polypeptide, or by glycosylation, acetylation, phosphorylation, and the like. Further included within the definition of “derivative” are, for example, polypeptides containing one or more analogs of an amino acid (e.g., unnatural amino acids and the like), polypeptides with unsubstituted linkages, as well as other modifications known in the art, both naturally and non-naturally occurring.

[0102] An “isolated” polypeptide is one which has been identified and separated and/or recovered from a component of its natural environment. Contaminant components of its natural environment are materials which would interfere with diagnostic or therapeutic uses for the polypeptide, and may include enzymes, hormones, and other proteinaceous or nonproteinaceous solutes. An isolated polypeptide includes an isolated antibody, or a fragment or derivative thereof.

[0103] The term “antibody” refers to a protein comprising one or more polypeptides substantially or partially encoded by immunoglobulin genes or fragments of immunoglobulin genes. The recognized immunoglobulin genes include the kappa, lambda, alpha, gamma, delta, epsilon and mu constant region genes, as well as myriad immunoglobulin variable region genes. Light chains are classified as either kappa or lambda. Heavy chains are classified as gamma, mu, alpha, delta, or epsilon, which in turn define the immunoglobulin classes, IgG, IgM, IgA, IgD and IgE, respectively. A typical immunoglobulin (e.g., antibody) structural unit comprises a tetramer. Each tetramer is composed of two identical pairs of polypeptide chains, each pair having one “light” (about 25 kD) and one “heavy” chain (about 50-70 kD). The N-terminus of each chain defines a variable region of about 100 to 110 or more amino acids primarily responsible for antigen recognition. The terms variable light chain (VL) and variable heavy chain (VH) refer to these light and heavy chains, respectively.

[0104] Antibodies exist as intact immunoglobulins or as a number of well-characterized fragments produced by digestion with various peptidases. Thus, for example, pepsin digests an antibody below the disulfide linkages in the hinge region to produce F(ab′)2, a dimer of Fab which itself is a light chain joined to VH-CH1 by a disulfide bond. The F(ab′)2 may be reduced under mild conditions to break the disulfide linkage in the hinge region thereby converting the F(ab′)2dimer into an Fab′ monomer. The Fab′ monomer is essentially an Fab with part of the hinge region (see, Fundamental Immunology, W. E. Paul, ed., Raven Press, New York (1999), for a more detailed description of other antibody fragments). While various antibody fragments are defined in terms of the digestion of an intact antibody, one of skill will appreciate that such Fab′ fragments, etc. may be synthesized de novo either chemically or by utilizing recombinant DNA methodology. Thus, the term antibody, as used herein also includes antibody fragments either produced by the modification of whole antibodies or synthesized de novo using recombinant DNA methodologies. Antibodies include single chain antibodies, including single chain Fv (sFv or scFv) antibodies in which a variable heavy and a variable light chain are joined together (directly or through a peptide linker) to form a continuous polypeptide.

[0105] In one embodiment, the terms “antibody portion” and “antibody domain” are used interchangeably herein and refer to a portion/domain of an antibody used to create a masking moiety described herein.

[0106] The term “about” as used herein means in quantitative terms plus or minus 5%, or in another embodiment plus or minus 10%, or in another embodiment plus or minus 15%, or in another embodiment plus or minus 20%.

[0107] Unless defined otherwise, all technical and scientific terms used herein have the same meaning as commonly understood by one of ordinary skill in the art to which the invention belongs. Although any methods and materials similar or equivalent to those described herein can be used in the practice or testing of the present invention, the preferred methods and materials are now described. All publications mentioned herein are incorporated herein by reference for the purpose of disclosing and describing material for which the reference was cited in connection with.

### Activatable Proproteins

[0108] In one embodiment, an activatable proprotein provided herein comprises a masking moiety linked to an active domain. In another embodiment, the activatable proprotein is a dimer. In one embodiment, the active domain comprises a dimer complex of IL-15/IL-15Rα. It is to be understood that the terms “complex of IL-15/IL-15Rα”, and “IL-15/IL-15Rα complex” are used interchangeably herein and refer to a monomer that joins to another monomer complex of IL-15/IL-15Rα via one or more linkers and/or one or more disulfide bonds and/or one or more non-covalent bonds, to form a dimer that makes up the active domain of an activatable proprotein described herein.

[0109] In one embodiment, an activatable proprotein provided herein comprises a first polypeptide and a second polypeptide, wherein the first and second polypeptide each comprise a masking moiety operably linked via a first linker on the C-terminus to an IL-15 or variant thereof, wherein the IL-15 or variant thereof is linked via a second linker on the C-terminus to an IL-15Rα or variant thereof, and wherein the masking moiety masks the active portion of the proprotein. In one embodiment, such an activatable proprotein comprises the format of Fc-IL-15-linker-IL-15Rα (Fc-ILR), where “Fc” corresponds to the masking domain. In another embodiment, a homodimer of an activatable proprotein comprises an amino acid sequence set forth in SEQ ID NO: 26.

Fc-GS-ENLYFQG-GS-IL-15-(GGS)5-IL-15Rα (homodimer)
(SEQ ID NO: 26)
EPKSSDKTHTCPPCPAPELLGGPSVFLFPPKPKDTLMISRTPEVTCVVV
DVSHEDPEVKFNWYVDGVEVHNAKTKPREEQYNSTYRVVSVLTVLHQDW
LNGKEYKCKVSNKALPAPIEKTISKAKGQPREPQVYTLPPSREEMTKNQ
VSLTCLVKGFYPSDIAVEWESNGQPENNYKTTPPVLDSDGSFFLYSKLT
VDKSRWQQGNVFSCSVMHEALHNHYTQKSLSLSPGK [symbol] NW
VNVISDLKKIEDLIQSMHIDATLYTESDVHPSCKVTAMKCFLLELQVIS
LESGDASIHDTVENLIILANNSLSSNGNVTESGCKECEELEEKNIKEFL
QSFVHIVQMFINTS [symbol] ITCPPPMSVEHADIWVKSYS
LYSRERYICNSGFKRKAGTSSLTECVLNKATNVAHWTTPSLKCIRDPAL
VHQRPAPPS.

[0110] In one embodiment, an activatable proprotein disclosed herein comprises SEQ ID NO: 26. In another embodiment, an activatable proprotein disclosed herein consists of SEQ ID NO: 26. In another embodiment, an activatable proprotein disclosed herein comprises a variant or homolog of SEQ ID NO: 26.

[0111] In one embodiment, provided is a cleavable linker comprising a protease cleavage site. An exemplary cleavable linker comprises a protease (TEV) cleavage site, which is demonstrated in bold and italics in SEQ ID NO: 26 above and is represented by SEQ ID NO: 344; the italicized and underlined sequences in SEQ ID NO: 26 above represent linker sequences surrounding the TEV cleavage site. It is to be understood that any cleavage site from any protease disclosed herein or available in the art may be inserted in a cleavable linker that links any of the components of the activatable proprotein, as further described herein. In one embodiment, the sequence of the proprotein, without a protease cleavage site comprises P1187 (SEQ ID NO: 18), P1188 (SEQ ID NO: 19), P1250 (SEQ ID NO: 20), P1251 (SEQ ID NO: 21), and P1252 (SEQ ID NO: 22), P1254 (SEQ ID NO: 24), P1255 (SEQ ID NO: 25), P1279 (SEQ ID NO: 41) and P1280 (SEQ ID NO: 42), see Example 1 and sequences that follow herein.

[0112] In a related embodiment, the activatable proprotein is a dimeric proprotein, where, in another embodiment, the dimeric proprotein comprises a first and second polypeptide each comprising an IL-15 or variant thereof operably linked via a first linker on the C-terminus to an IL-15Rα or variant thereof, wherein the IL-15Rα or variant thereof is linked via a second linker on the C-terminus to a masking moiety present on each of the first and second polypeptides, and wherein the masking moiety masks the active portion of the proprotein, and wherein the masking moiety of the first polypeptide forms one or more covalent disulfide bonds or one or more non-covalent bonds to the masking moiety of the second polypeptide. In one embodiment, such an activatable proprotein comprises the format of IL-15-linker-IL-15Rα-Fc (ILR-Fc), where “Fc” corresponds to the masking domain.

[0113] In one embodiment, the Fc-ILR form of the activatable proprotein comprises one or more protein domains attached to the C-terminal of IL-15Rα on the first polypeptide, the second polypeptide, or both the first and second polypeptides of the activatable proprotein (see for e.g. FIG. 3G-FIG. 3L).

[0114] In one embodiment, an activatable proprotein provided herein is designed to be activated preferentially inside tumor or cancer tissue (not in normal tissues).

[0115] In one embodiment, provided herein is an activatable proprotein comprising a first polypeptide and a second polypeptide, wherein the first and second polypeptide each comprise an IL-15 or variant thereof operably linked via a first linker on the C-terminus to an IL-15Rα or variant thereof, wherein the IL-15Rα or variant thereof is linked via a second linker on the C-terminus to a masking moiety present on each of the first and second polypeptides, and wherein the masking moiety masks the active portion of the proprotein. In another embodiment, such an activatable proprotein comprises SEQ ID NO: 17 or SEQ ID NO: 73 (see also FIG. 3B herein).

[0116] In another embodiment, an activatable proprotein disclosed herein is a dimeric proprotein. In another embodiment, an activatable proprotein disclosed herein is a dimeric fusion protein. In another embodiment, the dimeric proprotein comprises a first polypeptide and a second polypeptide each comprising from N-terminus to C-terminus the IL-15 or variant thereof linked via the first linker on the C-terminus to the IL-15Rα or variant thereof, wherein the IL-15Rα or variant thereof is linked via the second linker on the C-terminus to the masking moiety, and wherein the masking moiety of the first polypeptide forms one or more covalent disulfide bonds or non-covalent bonds with the masking moiety of the second polypeptide.

[0117] In another embodiment an activatable proprotein is a heterodimeric protein comprising heterodimeric masking moieties. In another embodiment, an activatable proprotein is a heterodimeric protein comprising heterodimeric active domain moieties. In another embodiment, an activatable proprotein provided herein is a heterodimeric protein comprising heterodimeric masking moieties and active domain moieties (see Figures herein).

### Activatable Proprotein—Active Domain

[0118] In one embodiment, the active domain of the activatable proprotein comprises a IL-15/IL-15Rα complex or variant thereof. In one embodiment, upon protease cleavage and exposure of the active domain in an activatable proprotein disclosed herein, IL-15 on the IL-15/IL-15Rα complex binds IL-15Rβ/γC on a cell surface of a lymphocyte of blood cell to activate a series of downstream pathways that lead to increased cellular growth, decreased apoptosis, enhanced immune cell activation and migration. Indeed, upon ligand binding, the IL-2/15Rβ and γC subunits to stimulate Janus kinase (Jak)1, Jak3, and signal transducer and activator of transcription (STAT)-5 pathway. After phosphorylation, STAT5 homo-dimerizes, translocates to the nucleus, and promotes the transcription of target genes. Additionally, IL-15 stimulates both the PI3K-AKT and RAS-MAPK pathways. Altogether, IL-15 signaling stimulates an array of downstream pathways leading to responses that have a crucial role in the development, function, and survival of CD8 T cells, NK cells, NKT cells and intestinal intraepithelial lymphocytes.

[0119] In some embodiments, the IL-15 or variant thereof is a human IL-15 or an amino acid mutant derived therefrom. In another embodiment, the IL-15Rα or variant thereof comprises a human IL-15Rα, a truncated human IL-15Rα or an amino acid mutant derived from human IL-15Rα. In another embodiment, a IL-15/IL-15Rα complex or variant thereof disclosed herein as part of the activatable proprotein comprises a human IL-15 or an amino acid mutant derived therefrom, and a human IL-15Rα, a truncated human IL-15Rα or an amino acid mutant derived from human IL-15Rα.

[0120] In one embodiment, the precursor amino acid sequence of human IL-15 comprises or consists of SEQ ID NO: 1, (See examples below; underlined sequence corresponds to the signal sequence or signal peptide). In another embodiment, the underlined sequence in SEQ ID NO: 1 corresponds to the signal sequence or signal peptide. In one embodiment, the mature amino acid sequence of human IL-15 with a point mutation of S162A comprises or consists of SEQ ID NO: 3.

[0121] In another embodiment, a human IL-15 amino acid sequence comprises a variant or homolog of SEQ ID NO: 1, SEQ ID NO: 2 or SEQ ID NO: 3.

[0122] In one embodiment, the full-length amino acid sequence of IL-15Rα comprises or consists of SEQ ID NO: 4 (See Examples below; underlined sequence corresponds to the signal sequence or signal peptide). In another embodiment, the IL-15Rα extracellular domain (ECD) comprises or consists of SEQ ID NO: 5. In another embodiment, the IL-15Rα sushi+ domain comprises or consists of SEQ ID NO: 6. In another embodiment, the IL-15Rα, sushi domain comprises or consists of SEQ ID NO: 7.

[0123] In one embodiment, the IL-15 or variant thereof and the IL-15Rα or variant thereof in the first polypeptide and the IL-15 or variant thereof and the IL-15Rα or variant thereof in the second polypeptide comprise one or more Cys substitution mutations. Having these mutations facilitates binding of the IL-15/IL-15 Rα complex on the first polypeptide with the IL-15/IL-15 Rα complex on the second polypeptide through disulfide bonds.

[0124] In another embodiment, the IL-15 or variant thereof in the first polypeptide comprising one or more Cys substitution mutations forms a disulfide bond with the IL-15Rα or variant thereof comprising one or more Cys substitution mutations in the second polypeptide. In another embodiment, the IL-15 or variant thereof in the second polypeptide comprising one or more Cys substitution mutations forms a disulfide bond with the IL-15Rα or variant thereof comprising one or more Cys substitution mutations in the first polypeptide.

### Activatable Proprotein—Linkers

[0125] In one embodiment, the first linker on the first or second polypeptide of an activatable proprotein disclosed herein, or on both the first and the second polypeptide of the same is a cleavable linker. In another embodiment, the second linker on the first or second polypeptide of an activatable proprotein disclosed herein, or on both the first and the second polypeptide of the same is a cleavable linker.

[0126] The term “linker” is art-recognized and refers to a molecule (including but not limited to unmodified or modified nucleic acids or amino acids) or group of molecules (for example, 2 or more, e.g., 2, 3, 4, 5, 6, 7, 8, 9, 10, 15, 20, 25, 30, 35, 40, 45, 50, 55, 60, 65, 70, 75, 80, 85, 90, 95, 100 or more) connecting two compounds, such as two polypeptides. The linker may be comprised of a single linking molecule or may comprise a linking molecule and at least one spacer molecule, intended to separate the linking molecule and a compound by a specific distance.

[0127] In one embodiment, the linkers include cleavable or non-cleavable linkers. Examples of a cleavable linker includes a linker have a cleavage site for a protease, for e.g. a TEV protease. Examples of a non-cleavable linker include a linker that is removed or degraded intracellularly or not cleaved.

[0128] In one embodiment, the activatable proprotein described herein and pharmaceutical compositions comprising the same can be used to directly target cancer cells so that the activatable proprotein is essentially activated when the a protease cleavable linker is cleaved so as to provide the active payload or when the non-cleavable linker is degraded or removed intracellularly by the targeted cell type.

[0129] In one embodiment, a non-cleavable linker is used to link any of the components of an activatable proprotein described herein. A non-limiting example of a non-cleavable linker comprises or consists of an amino acid sequence of GGSGGSGGSGGSGGS (SEQ ID NO: 345), or a homolog or variant thereof. It is to be understood that any non-cleavable linker known in the art may be used and is not limited to those disclosed herein.

[0130] In one embodiment, a linker used in the activatable proprotein described herein comprises an immunoglobulin (Ig)/antibody hinge region. In one embodiment, the hinge region is obtained from an IgG1 antibody. In one embodiment, the term Ig “hinge” region refers to a polypeptide comprising an amino acid sequence that shares sequence identity, or similarity, with a portion of a naturally-occurring Ig hinge region sequence, which includes the cysteine residues at which the disulfide bonds link the two heavy chains of the immunoglobulin. Sequence similarity of the hinge region linkers of the present invention with naturally-occurring immunoglobulin hinge region amino acid sequences can range from at least 50% to about 75-80%, and typically greater than about 90%.

[0131] Derivatives and analogs of the hinge region can be obtained by mutations. A derivative or analog, as referred to herein, is a polypeptide comprising an amino acid sequence that shares sequence identity, or similarity, with the full-length sequence of the wild type (or naturally occurring protein), except that it has one or more amino acid sequence differences attributable to a deletion, insertion and/or substitution.

[0132] The present invention also encompasses fragments of the hinge region for use as linkers. Such a fragment need only be long enough to allow the proteins attached by the hinge region fragment to attain a biologically active conformation. In one embodiment, the heterodimeric masking moiety of the activatable proprotein provided herein is joined to the heterodimeric active domain through fusion using an Ig hinge region. In one embodiment, the masking moiety and the active domain are homodimeric.

[0133] In one embodiment, a cleavable linker comprises or consists of a protease-cleavage site, flanked by linker sequences. In one embodiment, non-limiting example of a cleavable linker comprises or consists of an amino acid sequence of GSENLYFQGGS (SEQ ID NO: 346), or a homolog or variant thereof. It is to be understood that any cleavable linker known in the art may be used and is not limited to those disclosed herein. Cleavage sites for proteases disclosed herein are known in the art and are contemplated for use with any of the proteases disclosed herein or proteases available in the art.

[0134] In one embodiment, non-cleavable or cleavable linkers are inserted in an activatable proprotein (in the order of C-terminus to N-terminus) between the masking moiety and IL-15 and between IL-15 and IL-15Rα of an activatable proprotein disclosed herein. In another embodiment, non-cleavable or cleavable linkers are inserted in an activatable proprotein (in the order of C-terminus to N-terminus) between IL-15 and IL-15Rα and between IL-15Rα and a masking moiety of an activatable proprotein disclosed herein. In one embodiment, the cleavable linker(s) within the activatable proprotein comprises a cleavage site for a protease. In another embodiment, a first linker and/or a second linker of an activatable proprotein disclosed herein is a cleavable linker that comprises a cleavage site for a protease. In another embodiment, the protease is selected from a metalloprotease, a serine protease, a cysteine protease, an aspartic acid protease or any combination thereof. In another embodiment, the protease cleavage site is cleavable by a MMP1, MMP2, MMP3, MMP4, MMP5, MMP6, MMP7, MMP8, MMP9, MMP10, MMP11, MMP12, MMP13, MMP14, TEV, matriptase, uPA, FAP, Legumain, PSA, Kallikrein, Cathepsin A, or a Cathepsin B protease, or any protease available in the art. In one embodiment, the protease is any protease known in the art and is not limited to one disclosed herein.

[0135] In one embodiment, following a complete protease (e.g.—TEV protease) cleavage of a homodimer of an activatable proprotein disclosed herein, the activatable proprotein is cleaved into two cleaved products each comprising two chains:

[0136] Cleaved Product 1) Fc-GSENLYFQ Homodimer (Product from Complete Cleavage) (SEO ID NO: 27)

[0137] Chains 1 and 2 (Each Having the Same Sequence)

(SEQ ID NO: 27)
EPKSSDKTHTCPPCPAPELLGGPSVFLFPPKPKDTLMISRTPEVTC
VVVDVSHEDPEVKFNWYVDGVEVHNAKTKPREEQYNSTYRVVSVLT
VLHQDWLNGKEYKCKVSNKALPAPIEKTISKAKGQPREPQVYTLPP
SREEMTKNQVSLTCLVKGFYPSDIAVEWESNGQPENNYKTTPPVLD
SDGSFFLYSKLTVDKSRWQQGNVFSCSVMHEALHNHYTQKSLSLSP
GK [symbol] .

[0138] In one embodiment, SEQ ID NO: 27 comprises the masking moiety following protease cleavage of the activatable proprotein.

[0139] Cleaved Product 2) GGS-IL-15-(GGS)5-IL-15Rα Homodimer (Product from Complete Cleavage, Active Domain) (SEO ID NO: 28)

[0140] Chains 1 and 2 (Each Having the Same Sequence)

(SEQ ID NO: 28) [symbol]
NWVNVISDLKKIEDLIQSMHIDATLYTESDVHPSCKVTAMKCF
LLELQVISLESGDASIHDTVENLIILANNSLSSNGNVTESGCKECE
ELEEKNIKEFLQSFVHIVQMFINTS [symbol] [symbol] ITCPPP
MSVEHADIWVKSYSLYSRERYICNSGFKRKAGTSSLTECVLNKATN
VAHWTTPSLKCIRDPALVHQRPAPPS.

[0141] In one embodiment, SEQ ID NO: 28 comprises the active domain of the activatable proprotein following protease cleavage.

[0142] In one embodiment, following a partial protease cleavage (e.g.—using TEV protease) of a homodimer of an activatable proprotein disclosed herein, the masking moiety in the activatable proprotein is partially removed allowing access of the active domain (IL-15/IL-15Rα complex) to binding by IL-15Rβ/γC (see FIG. 6). In another embodiment, the partially cleaved activatable proprotein comprises SEQ ID NO: 29, 30 and 31.

[0143] Cleaved Product 3) Fc-GS-ENLYFQG-GS-IL-15-(GGS)5-IL-15Rα/Fc-GSENLYFQ/GGS-IL-15-(GGS)5-IL-15Rα (Product from Partial Cleavage. Active)(SEO ID NO:29, 30 and 31).

Chain 1: Fc-GS-ENLYFQG-GS-IL-15-(GGS)5-IL-15Rα
(SEQ ID NO: 29)
EPKSSDKTHTCPPCPAPELLGGPSVFLFPPKPKDTLMISRTPEVTC
VVVDVSHEDPEVKFNWYVDGVEVHNAKTKPREEQYNSTYRVVSVLT
VLHQDWLNGKEYKCKVSNKALPAPIEKTISKAKGQPREPQVYTLPP
SREEMTKNQVSLTCLVKGFYPSDIAVEWESNGQPENNYKTTPPVLD
SDGSFFLYSKLTVDKSRWQQGNVFSCSVMHEALHNHYTQKSLSLSP
GK [symbol] NWVNVISDLKKIEDLIQSMHIDATLYTESDVHP
SCKVTAMKCFLLELQVISLESGDASIHDTVENLIILANNSLSSNGN
VTESGCKECEELEEKNIKEFLQSFVHIVQMFINTS [symbol] [symbol]
ITCPPPMSVEHADIWVKSYSLYSRERYICNSGFKRKA
GTSSLTECVLNKATNVAHWTTPSLKCIRDPALVHQRPAPPS
Chain 2: Fc-GSENLYFQ
(SEQ ID NO: 30)
EPKSSDKTHTCPPCPAPELLGGPSVFLFPPKPKDTLMISRTPEVTC
VVVDVSHEDPEVKFNWYVDGVEVHNAKTKPREEQYNSTYRVVSVLT
VLHQDWLNGKEYKCKVSNKALPAPIEKTISKAKGQPREPQVYTLPP
SREEMTKNQVSLTCLVKGFYPSDIAVEWESNGQPENNYKTTPPVLD
SDGSFELYSKLTVDKSRWQQGNVFSCSVMHEALHNHYTQKSLSLSP
GK [symbol] .
Chain 3: GGS-IL-15-(GGS)5-IL-15Rα
(SEQ ID NO: 31) [symbol]
NWVNVISDLKKIEDLIQSMHIDATLYTESDVHPSCKVTAMKCF
LLELQVISLESGDASIHDTVENLIILANNSLSSNGNVTESGCKECE
ELEEKNIKEFLQSFVHIVQMFINTS [symbol] [symbol] ITCPPP
MSVEHADIWVKSYSLYSRERYICNSGFKRKAGTSSLTECVLNKATN
VAHWTTPSLKCIRDPALVHQRPAPPS.

[0144] Linkers suitable for use in compositions described herein are generally ones that provide flexibility of the masking moiety or activatable proprotein to facilitate the inhibition of the binding active portion of the activatable proprotein, namely the IL-15/IL-15Rα complex. Such linkers are generally referred to as flexible linkers. Suitable linkers can be readily selected and can be of any of a suitable of different lengths, such as from 1 amino acid (e.g., Gly) to 20 amino acids, from 2 amino acids to 15 amino acids, from 3 amino acids to 12 amino acids, including 4 amino acids to 10 amino acids, 5 amino acids to 9 amino acids, 6 amino acids to 8 amino acids, or 7 amino acids to 8 amino acids, and may be 1, 2, 3, 4, 5, 6, or 7 amino acids. In one embodiment, the linker is 26 amino acids long. In another embodiment, the linker is 5-9, 10-15, 16-20, 21-25, 26-30, 31-35, 36-40, 41-45, or 46-50 amino acids long.

[0145] Exemplary flexible linkers include glycine polymers (G)n, glycine-serine polymers (including, for example, (GS)n, (GSGGS)n, and (GGGS)n, where n is an integer of at least one), glycine-alanine polymers, alanine-serine polymers, and other flexible linkers known in the art, see e.g. U.S. Pat. No. 10,059,762 B2, which is incorporated by reference herein in its entirety. Glycine and glycine-serine polymers are relatively unstructured, and therefore may be able to serve as a neutral tether between components. Glycine accesses significantly more phi-psi space than even alanine, and is much less restricted than residues with longer side chains (see Scheraga, Rev. Computational Chem. 11173-142 (1992)). The ordinarily skilled artisan will recognize that design of an activatable proprotein can include linkers that are all or partially flexible, such that the linker can include a flexible linker as well as one or more portions that confer less flexible structure to provide for a desired activatable proprotein structure.

[0146] In one embodiment, protease cleavage of a cleavable linker in a first or second polypeptide partially removes the masking moiety in the activatable proprotein such that the IL-15/IL-15Rα complex in the first or second polypeptide can bind IL-15Rβ/γC present on the surface of a lymphocyte or a blood cell in vivo. In one embodiment, protease cleavage of a cleavable linker in a first and second polypeptide completely removes the masking moiety in the activatable proprotein such that the IL-15/IL-IL-15Rα complex in the first and the second polypeptide can bind IL-15Rβ/γC present on the surface of a lymphocyte or a blood cell in vivo.

[0147] In one embodiment, the linker may comprise a spacer element and a cleavable element so as to make the cleavable element more accessible to the enzyme responsible for cleavage.

### Activatable Proprotein—Masking Moiety

[0148] In one embodiment, an activatable proprotein of the invention comprises a masking moiety dimer that masks the active domain. Hence, within the context of an activatable proprotein provided herein, when the active domain comprising an IL-15/IL-IL-15Rα complex is modified by the addition of a masking moiety (via one or more cleavable linkers) and is in the presence of the target (IL-15Rβ/γC), specific binding of the active domain to its target is blocked, reduced or inhibited, as compared to the specific binding of the active domain not modified by the addition of a masking moiety. In another embodiment, when the active domain comprising an IL-15/IL-IL-15Rα complex is modified by the addition of a masking moiety (for example, via one or more cleavable linkers) and is in the presence of the target (IL-15Rβ/γC), specific binding of the active domain to its target is blocked, reduced or inhibited, as compared to the specific binding of the active proprotein in the presence of sufficient protease enzyme or protease enzyme activity to partially or completely cleave the masking moiety from the activatable proprotein. In some embodiments, protease cleavage of linkers between the masking moiety and the active domain in the activatable proprotein leads to activation (“frees up”) the active domain. This activation preferably occurs at a tumor site or in a cancer tissue.

[0149] In one embodiment, the masking moiety is fused to an active domain to form a fusion protein. In one embodiment, the fusion protein is recombinantly generated. In another embodiment, the fusion protein is chemically generated (i.e.—chemically fused).

[0150] In one embodiment, the masking moiety specific binds to the active domain. In another embodiment, the masking moiety lacks the ability to specifically bind to the active domain. In one embodiment, the masking moiety and the linkers between the ILR and the masking moiety sterically hinder the ability of IL-15 in the active domain to bind to and signal through IL-15Rβ/γc.

[0151] In one embodiment, a masking moiety of an activatable proprotein disclosed herein comprises the amino acid sequence set forth in SEQ ID NO: 8, SEQ ID NO: 9, SEQ ID NO: 10 or SEQ ID NO: 11. In another embodiment, a masking moiety of an activatable proprotein disclosed herein comprises an amino acid sequence selected from the group consisting of SEQ ID NO: 8, SEQ ID NO: 9, SEQ ID NO: 10 and SEQ ID NO: 11.

[0152] In one embodiment, the masking moiety can sterically inhibit the binding of the active domain of the activatable proprotein to a target, wherein in another embodiment, the target is IL-15Rβ/γC. In another embodiment, the masking moiety can allosterically inhibit the binding of the activatable proprotein to its target. In these embodiments when the active domain is modified by coupling to a masking moiety (to form an activatable proprotein as described herein) and in the presence of target, there is no binding or substantially no binding of the active domain to the target, or no more than 0.001%, 0.01%, 0.1%, 1%, 2%, 3%, 4%, 5%, 6%, 7%, 8%, 9%, 10%, 15%, 20%, 25%, 30%, 35%, 40%, or 50% binding of the active domain to the target, as compared to the binding of the active domain not modified with a masking moiety or the binding of the active domain not coupled to a masking moiety for at least 2, 4, 6, 8, 12, 28, 24, 30, 36, 48, 60, 72, 84, 96 hours, or 5, 10, 15, 30, 45, 60, 90, 120, 150, 180 days, or 1, 2, 3, 4, 5, 6, 7, 8, 9, 10, 11, 12 months or greater when measured in vivo or in a Target Displacement in vitro assay available in the art.

[0153] In one embodiment, when the active domain is in a ‘masked’ state, even in the presence of a target the masking moiety interferes with or inhibits the binding of the active domain to the target. However, in the unmasked state of the active domain, the masking moiety's interference with target binding to the active domain is reduced, thereby allowing greater access of the active domain to the target and providing for target binding.

[0154] In one embodiment, the active domain in the activatable proprotein can be unmasked upon cleavage, in the presence of enzyme, where in a preferred embodiment, the enzyme is a disease-specific enzyme, such as a cancer-specific or a tumor-specific protease. Thus, the masking moiety is one that when the active domain within the activatable proprotein is uncleaved provides for masking of the active domain from target binding, but does not substantially or significantly interfere or compete for binding of the target to the active domain when the activatable proprotein has been cleaved. Thus, the activatable proprotein facilitates the switchable/activatable phenotype, with the masking moiety decreasing binding of target when the activatable proprotein is uncleaved, and with cleavage of the masking moiety by protease providing for increased binding of target by the active domain.

[0155] In one embodiment, the structural properties of the masking moiety will vary according to a variety of factors such as the minimum amino acid sequence required for interference with active domain binding to target, the length of the linker between the masking moiety and the active domain, the presence or absence of a cysteine within or flanking the active domain that is suitable for providing dissociation of a cysteine-cysteine disulfide bond, and the like.

[0156] In one embodiment, the masking moiety in the first polypeptide and/or in the second polypeptide comprises one or more protein domains. In another embodiment, the masking moiety in the first polypeptide and/or in the second polypeptide comprises a CH3 variant domain of an antibody constant (Fc) region. In another embodiment, the CH3 variant domain of an antibody constant (Fc) region comprises a CH1, CH2, CH3, CH2CH3, or CH1CH2CH3 domain. In another embodiment, the masking moiety in the first polypeptide and/or in the second polypeptide comprises a CH1, CH2, CH3, CH2CH3, or CH1CH2CH3 domain of an antibody constant (Fc) region. In another embodiment, the masking moiety in the first polypeptide comprises one or more heterodimers of at least two different CH3 variant domains of an antibody constant (Fc) region. In another embodiment, the masking moiety in the first polypeptide and/or in the second polypeptide comprises a CH3 variant domain of an antibody constant (Fc) region, wherein the CH3 variant domain comprises one or more mutations.

[0157] In one embodiment, the masking moiety in the first polypeptide and/or in the second polypeptide comprises a fusion of an antigen binding domain with a CH3 variant domain of an antibody constant (Fc) region. In another embodiment, the masking moiety in the first polypeptide and/or in the second polypeptide comprises a fusion of an antigen binding domain with a CH1, CH2, CH3, CH2CH3, or CH1CH2CH3 domain of an antibody constant (Fc) region.

[0158] In one embodiment, the masking moiety in the first polypeptide and/or in the second polypeptide does not bind an antigen. In another embodiment, the masking moiety in the first polypeptide and/or in the second polypeptide binds to an antigen. In another embodiment, the masking moiety in the first polypeptide and/or in the second polypeptide comprises an antigen binding domain. In another embodiment, the antigen binding domain is a variable heavy chain domain (VH), a variable domain from a heavy chain antibody (VHH), or an antigen specific peptide. In another embodiment, the antigen binding domain comprises an antibody light chain (LC) and an antibody heavy chain (HC). In another embodiment, the masking moiety comprises a constant domain of an antibody light chain (CL), wherein the light chain is a lambda or kappa chain.

[0159] The antibody domain of the fusion protein disclosed herein optionally comprises all or part of an immunoglobin molecule and optionally contains all or part of an immunoglobin constant domain region (Fc region).

[0160] The antibodies used herein optionally comprise IgG domains. However, other embodiments comprise alternate immunoglobins such as IgM, IgA, IgD, and IgE. Furthermore, all possible isotypes of the various immunoglobins are also encompassed within the current embodiments. Thus, IgG1, IgG2, IgG3, etc. are all possible molecules in the antibody domains of the antibody-immunostimulant fusion proteins used in the invention. In addition to choice in selection of the type of immunoglobin and isotype, different embodiments of the invention comprise various hinge regions (or functional equivalents thereof). Such hinge regions provide flexibility between the different domains of the antibody-immunostimulant fusion proteins. See, e.g., Penichet, et al. 2001 “Antibody-cytokine fusion proteins for the therapy of cancer” J Immunol Methods 248:91-101. In some embodiments, the antibody portion used in the compositions and methods provided herein is from an immunoglobulin class selected from IgG1, IgG2, IgG3, IgG4, IgD, IgA, or IgM.

[0161] In one embodiment, the masking moiety can be selected through a screening procedure that determines the optimal combination of masking moiety with cleavable linker that yields optimal inhibition of an active domain within the context of an activatable proprotein.

[0162] In one embodiment, the masking moiety in the first and/or second polypeptide prevents binding of a complex of IL-15/IL-15Rα in the first and/or second polypeptide to IL-15Rβ/γC present on the surface of a lymphocyte or a blood cell in vitro or in vivo.

[0163] In one embodiment, the cleavage of the masking moieties in any one of the first and/or second polypeptides in the activatable proprotein leads to partial activation of the activatable proprotein. In one embodiment, the masking moiety can interact or not interact with the complex of IL-15/IL-15Rα following partial activation (partial cleavage) of the activatable proprotein. In another embodiment, the cleavage of the masking moiety in both the first and second polypeptides in the activatable proprotein leads to complete activation of the activatable proprotein into an active complex of IL-15/IL-15Rα or a variant thereof.

[0164] In one embodiment, a humanized antibody may be used in the compositions and methods provided herein. In another embodiment, a humanized antibody may be used to generate a masking moiety provided herein. In another embodiment, a humanized antibody may be used to generate a masking moiety comprising an antigen binding domain provided herein. In another embodiment, a humanized antibody may be used to generate an antigen binding domain provided herein. In some embodiments, the term “humanized antibody” or “humanized version of an antibody” refers to antibodies in which the framework or “complementarity determining regions” (CDR) have been modified to comprise the CDR of an immunoglobulin of different specificity as compared to that of the parent immunoglobulin. In other embodiments, the CDRs of the VH and VL are grafted into the framework region of a human antibody to prepare the “humanized antibody.” See e.g. Riechmann, L., et al, Nature 332 (1988) 323-327; and Neuberger, M. S., et al, Nature 314 (1985) 268-270. The heavy and light chain variable framework regions can be derived from the same or different human antibody sequences. The human antibody sequences can be the sequences of naturally occurring human antibodies. Human heavy and light chain variable framework regions are listed e.g. in Lefranc, M.-P., Current Protocols in Immunology (2000)—Appendix IP A.1P.1-A.1P.37 and are accessible via IMGT, the international ImMunoGeneTics information System® (http://imgt.cines.fr) or via http://vbase.mrc-cpe.cam.ac.uk. Optionally the framework region can be modified by further mutations. The term “humanized antibody” as used herein also comprises such antibodies which are modified in the constant region to generate the properties according to the invention, especially in regard to Clq binding and/or FcR binding, e.g. by “class switching” i.e. change or mutation of Fc parts (e.g. from IgGl to IgG4 and/or IgGl/IgG4 mutation). The term “human antibody”, as used herein, is intended to include antibodies having variable and constant regions derived from human germ line immunoglobulin sequences. Human antibodies are well-known in the state of the art (van Dijk, M. A., and van de Winkel, J. G., Curr. Opin. Chem. Biol. 5 (2001) 368-374). Human antibodies can also be produced in transgenic animals (e.g., mice) that are capable, upon immunization, of producing a full repertoire or a selection of human antibodies in the absence of endogenous immunoglobulin production. Transfer of the human germ-line immunoglobulin gene array in such germ-line mutant mice will result in the production of human antibodies upon antigen challenge (see, e.g., Jakobovits, A., et al, Proc. Natl. Acad. Sci. USA 90 (1993) 2551-2555; Jakobovits, A., et al, Nature 362 (1993) 255-258; Brueggemann, M. D., et al., Year Immunol. 7 (1993) 33-40). Human antibodies can also be produced in phage display libraries (Hoogenboom, H. R., and Winter, G., J. Mol. Biol. 227 (1992) 381-388; Marks, J. D., et al, J. Mol. Biol. 222 (1991) 581-597). The techniques of Cole, A., et al. and Boerner, P., et al. are also available for the preparation of human monoclonal antibodies (Cole, A., et al., Monoclonal Antibodies and Cancer Therapy, Liss, A. L., p. 77 (1985); and Boerner, P., et al, J. Immunol. 147 (1991) 86-95). As already mentioned for humanized antibodies according to the invention the term “human antibody” as used herein also comprises such antibodies or portions thereof which are modified in the constant region to generate the properties according to the invention.

[0165] In one particular embodiment, the mAb comprised by the activatable proprotein provided herein comprises at least one or more domains from the Fc region and/or one or more domains from the Variable regions.

[0166] In one embodiment, a recombinant human antibody may be the source of the masking moiety of the disclosed activatable proprotein. The term “recombinant human antibody”, as used herein, is intended to include all human antibodies that are prepared, expressed, created or isolated by recombinant means, such as antibodies isolated from a host cell, for example a NS0 or CHO cell or from an animal (e.g. a mouse) that is transgenic for human immunoglobulin genes or antibodies expressed using a recombinant expression vector transfected into a host cell. Such recombinant human antibodies have variable and constant regions in a rearranged form. The recombinant human antibodies according to the invention have been subjected to in vivo somatic hypermutation. Thus, the amino acid sequences of the VH and VL regions of the recombinant antibodies are sequences that, while derived from and related to human germ line VH and VL sequences, may not naturally exist within the human antibody germ line repertoire in vivo.

[0167] In some embodiments, a masking moiety comprising an antigen binding domain that binds to an antigen as disclosed herein binds to the antigen with an optimal binding affinity. In other embodiments, a masking moiety comprising an antigen binding domain that binds to an antigen as disclosed herein binds to the antigen with a binding affinity within a range of KD 1.0×10⁻⁸ mol/l-1.0×10⁻¹ mol/l) at 25° C. The binding affinity is determined with a standard binding assay at 25° C., such as surface plasmon resonance technique (BIAcore®, GE-Healthcare Uppsala, Sweden). In one embodiment, a masking moiety comprised by an activatable proprotein disclosed herein comprises a variable region heavy (VH) chain and/or a variable region light (VL) chain.

[0168] In one embodiment of the invention, the antibody constant domains present in a masking moiety of an activatable proprotein provided herein is glycosylated. In some embodiments, the glycosylation is N-glycosylation. In other embodiments, the glycosylation is O-glycosylation.

### Constructs Encoding Activatable Proproteins

[0169] In one embodiment, provided herein is a vector comprising a recombinant nucleic acid molecule or polynucleotide encoding the activatable proprotein disclosed herein.

[0170] In one embodiment, provided herein is a recombinant nucleic acid molecule encoding the activatable proprotein of the invention. In one embodiment, one or more native or recombinant nucleic acid molecules are used to arrive at any of the amino acid sequences disclosed in the Sequence Listing, including SEQ ID NO: 1-SEQ ID NO: 346.

[0171] The disclosure further provides vectors and nucleic acid constructs which include sequences coding for a proprotein disclosed herein. Suitable nucleic acid constructs include, but are not limited to, constructs which are capable of expression in prokaryotic or eukaryotic cells. Expression constructs are generally selected so as to be compatible with the host cell in which they are to be used. In certain embodiments, the vector encodes an activatable proprotein (masking moiety, IL-15/IL-15Rα complex and cleavable linkers).

[0172] For example, non-viral and/or viral constructs vectors may be prepared and used, including plasmids, which provide for replication of a proprotein—encoding DNA and/or expression in a host cell. The choice of vector will depend on the type of cell in which propagation is desired and the purpose of propagation. Certain constructs are useful for amplifying and making large amounts of the desired DNA sequence. Other vectors are suitable for expression in cells in culture. The choice of appropriate vector is well within the skill of the art. Many such vectors are available commercially. Methods for generating constructs can be accomplished using methods well known in the art.

[0173] In order to effect expression in a host cell, a polynucleotide encoding an activatable proprotein disclosed herein or component thereof is operably linked to a regulatory sequence as appropriate to facilitate the desired expression properties. These regulatory sequences can include promoters, enhancers, terminators, operators, repressors, and inducers. Expression constructs generally also provide a transcriptional and translational initiation region as may be needed or desired, which may be inducible or constitutive, where the coding region is operably linked under the transcriptional control of the transcriptional initiation region, and a transcriptional and translational termination region. These control regions may be native to the species from which the nucleic acid is obtained, or may be derived from exogenous sources. In the context of an activatable proprotein provided herein, the masking moiety may be produced via recombinant means along with the additional components of a first polypeptide and a second polypeptide of the activatable proprotein (i.e.—IL-15/IL-15Rα and linkers), where the first and second polypeptide are joined via disulfide bonds and/or non-covalent bonds to form a dimer. Such methods are widely known in the state of the art and comprise protein expression in prokaryotic and eukaryotic cells with subsequent isolation of the activatable proprotein and usually purification to a pharmaceutically acceptable purity. For the protein expression nucleic acids encoding the components of the activatable proprotein (including light and heavy chains or fragments thereof of the masking moiety) are inserted into expression vectors by standard methods. Expression is performed in appropriate prokaryotic or eukaryotic host cells, such as CHO cells, NS0 cells, SP2/0 cells, HEK293 cells, COS cells, yeast, or E. coli cells, and the activatable proprotein is recovered from the cells (from the supernatant or after cells lysis).

[0174] A nucleic acid sequence is “operably linked” when it is placed into a functional relationship with another nucleic acid sequence. For example, a nucleic acid presequence or secretory leader is operably linked to a nucleic acid encoding a polypeptide if it is expressed as a preprotein that participates in the secretion of the polypeptide; a promoter or enhancer is operably linked to a coding sequence if it affects the transcription of the sequence; or a ribosome binding site is operably linked to a coding sequence if it is positioned so as to facilitate translation. Generally, “operably linked” means that the nucleic acid sequences being linked are contiguous, and, in the case of a secretory leader, contiguous and in reading frame. However, enhancers are optionally contiguous. Linking can be accomplished, for example, by ligation at convenient restriction sites. If such sites do not exist, synthetic oligonucleotide adaptors, linkers or other methods known in the art can be used. In another embodiment, the “operably linked” also refers to the functional pairing of distinct amino acid sequences, peptides or proteins, as in the pairing of the masking moiety and IL-15 described herein via a linker sequence also described herein.

[0175] Constructs, including expression constructs, can also include a selectable marker operative in the host to facilitate, for example, growth of host cells containing the construct of interest. Such selectable marker genes can provide a phenotypic trait for selection of transformed host cells such as dihydrofolate reductase or neomycin resistance for eukaryotic cell culture.

[0176] In one embodiment, the heavy and light chain constant domains in a masking moiety according to the invention are combined with sequences of promoter, translation initiation, constant region, 3′ untranslated region, polyadenylation, and transcription termination to form expression vector constructs. The heavy and light chain expression constructs can be combined into a single vector, co-transfected, serially transfected, or separately transfected into host cells which are then fused to form a single host cell expressing both chains. In one embodiment, the heavy and light chains are recombinantly constructed together with the other components of an activatable proprotein disclosed herein.

[0177] In some embodiments, the activatable proprotein utilized in the current invention may be optionally obtained or created by any method known in the art. For example, nucleic acid sequences encoding the appropriate components are optionally cloned and ligated into appropriate vectors (e.g., expression vectors for, e.g., prokaryotic or eukaryotic organisms). Additionally, nucleic acid sequences encoding the appropriate components are optionally cloned into the same vector in the appropriate orientation and location so that expression from the vector produces an activatable proprotein of the invention. Some optional embodiments also require post-expression modification, e.g., assembly of antibody subunits, etc. The techniques and art for the above (and similar) manipulations are well known to those skilled in the art. Pertinent instructions are found in, e.g., Sambrook et al., Molecular Cloning-A Laboratory Manual (2nd Ed.), Vols. 1-3, Cold Spring Harbor Laboratory, Cold Spring Harbor, N.Y., 1989 and Current Protocols in Molecular Biology, F. M. Ausubel et al., eds., Current Protocols, a joint venture between Greene Publishing Associates, Inc. and John Wiley & Sons, Inc. (supplemented through 1999). In some alternate embodiments, the components of the activatable proprotein are assembled post-expression through, e.g., chemical means.

[0178] In some embodiments, an activatable proprotein provided herein is administered to a patient in therapeutically effective amount which is the amount of the subject compound or combination that will elicit the biological or medical response of a tissue, system, animal or human that is being sought by a researcher, veterinarian, medical doctor or other clinician.

### Activatable Proprotein—Compositions

[0179] In one embodiment, the present invention provides a composition, e.g. a pharmaceutical composition comprising the activatable proprotein of the invention. In another embodiment, provided herein is a pharmaceutical composition comprising the activatable proprotein, and a pharmaceutically acceptable carrier. In some embodiments, provided are pharmaceutical compositions comprising the activatable proprotein disclosed herein formulated together with a pharmaceutical carrier.

[0180] In one embodiment, the activatable proprotein amino acid sequence is homologous to any amino acid sequence encoding an activatable proprotein disclosed herein. The term “homology” may refer to identity to an a sequence disclosed herein of greater than 70%. In another embodiment, “homology” refers to identity to any sequence disclosed herein of greater than 72%. In another embodiment, “homology” refers to identity to any sequence disclosed herein of greater than 75%. In another embodiment, “homology” refers to identity to any sequence disclosed herein of greater than 78%. In another embodiment, “homology” refers to identity to any of SEQ ID SEQ ID NO: X-Y of greater than 80%. In another embodiment, “homology” refers to identity to any sequence disclosed herein of greater than 82%. In another embodiment, “homology” refers to identity to any sequence disclosed herein of greater than 83%. In another embodiment, “homology” refers to identity to any sequence disclosed herein of greater than 85%. In another embodiment, “homology” refers to identity to any sequence disclosed herein of greater than 87%. In another embodiment, “homology” refers to identity to any sequence disclosed herein of greater than 88%. In another embodiment, “homology” refers to identity to any sequence disclosed herein of greater than 90%. In another embodiment, “homology” refers to identity to any sequence disclosed herein of greater than 92%. In another embodiment, “homology” refers to identity to any sequence disclosed herein of greater than 93%. In another embodiment, “homology” refers to identity to any sequence disclosed herein of greater than 95%. In another embodiment, “homology” refers to identity to any sequence disclosed herein of greater than 96%. In another embodiment, “homology” refers to identity to any sequence disclosed herein of greater than 97%. In another embodiment, “homology” refers to identity to any sequence disclosed herein of greater than 98%. In another embodiment, “homology” refers to identity to any sequence disclosed herein of greater than 99%. In another embodiment, “homology” refers to identity to any sequence disclosed herein of 100%.

[0181] The determination of percent identity between two sequences can be accomplished using a mathematical algorithm. A non-limiting example of a mathematical algorithm utilized for the comparison of two sequences is the algorithm of Karlin and Altschul, 1990, Proc. Natl. Acad. Sci. USA 87:2264-2268, modified as in Karlin and Altschul, 1993, Proc. Natl. Acad. Sci. USA 90:5873-5877. Such an algorithm is incorporated into the NBLAST and XBLAST programs of Altschul et al., 1990, J. Mol. Biol. 215:403-410. BLAST nucleotide searches can be performed with the NBLAST program, score=100, wordlength=12, to obtain nucleotide sequences homologous to a nucleic acid encoding a protein of interest. BLAST protein searches can be performed with the XBLAST program, score=50, wordlength=3, to obtain amino acid sequences homologous to a protein of interest. To obtain gapped alignments for comparison purposes, Gapped BLAST can be utilized as described in Altschul et al., 1997, Nucleic Acids Res. 25:3389-3402. Alternatively, PSI-Blast can be used to perform an iterated search which detects distant relationships between molecules (id.). When utilizing BLAST, Gapped BLAST, and PSI-BLAST programs, the default parameters of the respective programs (e.g., XBLAST and NBLAST) can be used. Another non-limiting example of a mathematical algorithm utilized for the comparison of sequences is the algorithm of Myers and Miller, CABIOS (1989). Such an algorithm is incorporated into the ALIGN program (version 2.0) which is part of the GCG sequence alignment software package. When utilizing the ALIGN program for comparing amino acid sequences, a PAM120 weight residue table, a gap length penalty of 12, and a gap penalty of 4 can be used. Additional algorithms for sequence analysis are known in the art and include ADVANCE and ADAM as described in Torellis and Robotti, 1994, Comput. Appl. Biosci. 10:3-5; and FASTA described in Pearson and Lipman, 1988, Proc. Natl. Acad. Sci. USA 85:2444-8. Within FASTA, ktup is a control option that sets the sensitivity and speed of the search. If ktup=2, similar regions in the two sequences being compared are found by looking at pairs of aligned residues; if ktup=1, single aligned amino acids are examined. ktup can be set to 2 or 1 for protein sequences, or from 1 to 6 for DNA sequences. The default if ktup is not specified is 2 for proteins and 6 for DNA. Alternatively, protein sequence alignment may be carried out using the CLUSTAL W algorithm, as described by Higgins et al., 1996, Methods Enzymol. 266:383-402.

[0182] In some embodiments, polynucleotides of the present invention are prepared using PCR techniques using procedures and methods known to one skilled in the art. In some embodiments, the procedure involves the ligation of two different DNA sequences (See, for example, “Current Protocols in Molecular Biology”, eds. Ausubel et al., John Wiley & Sons, 1992).

[0183] In one embodiment, an affinity tag be included in an activatable proprotein disclosed herein. Affinity tags are well known in the art and are attached to a target and used to detect or isolate the target using a molecule that binds the affinity tag. In principal, any peptide or protein for which an antibody or other specific binding agent is available can be used as an affinity tag. Exemplary affinity tags suitable for use include, but are not limited to, a monocytic adaptor protein (MONA) binding peptide, a T7 binding peptide, a streptavidin binding peptide, a polyhistidine tract, protein A (Nilsson et al., EMBO J. 4:1075 (1985); Nilsson et al., Methods Enzymol. 198:3 (1991)), glutathione S transferase (Smith and Johnson, Gene 67:31 (1988)), Glu-Glu affinity tag (Grussenmeyer et al., Proc. Natl. Acad. Sci. USA 82:7952 (1985)), substance P, FLAG peptide (Hopp et al., Biotechnology 6:1204 (1988)), or other antigenic epitope or binding domain. See, in general, Ford et al., Protein Expression and Purification 2:95 (1991). DNA molecules encoding affinity tags are available from commercial suppliers (e.g., Pharmacia Biotech, Piscataway, N.J.). In one embodiment, a His6 tag is included in an activatable proprotein disclosed herein.

[0184] In one embodiment, polynucleotides of the present invention are inserted into expression vectors (i.e., a nucleic acid construct) to enable expression of the polypeptides described herein. In one embodiment, the expression vector of the present invention includes additional sequences which render this vector suitable for replication and integration in prokaryotes. In one embodiment, the expression vector of the present invention includes additional sequences which render this vector suitable for replication and integration in eukaryotes. In one embodiment, the expression vector of the present invention includes a shuttle vector which renders this vector suitable for replication and integration in both prokaryotes and eukaryotes. In some embodiments, cloning vectors comprise transcription and translation initiation sequences (e.g., promoters, enhancer) and transcription and translation terminators (e.g., polyadenylation signals).

[0185] In one embodiment, a variety of prokaryotic or eukaryotic cells can be used as host-expression systems to express the polypeptides of the present invention. In some embodiments, these include, but are not limited to, microorganisms, such as bacteria transformed with a recombinant bacteriophage DNA, plasmid DNA or cosmid DNA expression vector containing the polypeptide coding sequence; yeast transformed with recombinant yeast expression vectors containing the polypeptide coding sequence.

[0186] In some embodiments, non-bacterial expression systems are used (e.g., mammalian expression systems such as CHO cells) to express the polypeptide of the present invention. In one embodiment, the expression vector used to express polynucleotides of the present invention in mammalian cells is pCI-DHFR vector comprising a CMV promoter and a neomycin resistance gene.

[0187] In some embodiments, in bacterial systems of the present invention, a number of expression vectors can be advantageously selected depending upon the use intended for the polypeptide expressed. In one embodiment, large quantities of polypeptide are desired. In one embodiment, vectors that direct the expression of high levels of the protein product, possibly as a fusion with a hydrophobic signal sequence, which directs the expressed product into the periplasm of the bacteria or the culture medium where the protein product is readily purified are desired. In one embodiment, vectors adaptable to such manipulation include, but are not limited to, the pET series of E. coli expression vectors [Studier et al., Methods in Enzymol. 185:60-89 (1990)].

[0188] In one embodiment, yeast expression systems are used. In one embodiment, a number of vectors containing constitutive or inducible promoters can be used in yeast as disclosed in U.S. Pat. No. 5,932,447. In another embodiment, vectors which promote integration of foreign DNA sequences into the yeast chromosome are used.

[0189] In one embodiment, the expression vector of the present invention can further include additional polynucleotide sequences that allow, for example, the translation of several proteins from a single mRNA such as an internal ribosome entry site (IRES) and sequences for genomic integration of the promoter-chimeric polypeptide.

[0190] In some embodiments, mammalian expression vectors include, but are not limited to, pcDNA3, pcDNA3.1(+/−), pGL3, pZeoSV2(+/−), pSecTag2, pDisplay, pEF/myc/cyto, pCMV/myc/cyto, pCR3.1, pSinRep5, DH26S, DHBB, pNMT1, pNMT41, pNMT81, which are available from Invitrogen, pCI which is available from Promega, pMbac, pPbac, pBK-RSV and pBK-CMV which are available from Strategene, pTRES which is available from Clontech, and their derivatives.

[0191] In some embodiments, expression vectors containing regulatory elements from eukaryotic viruses such as retroviruses are used by the present invention. SV40 vectors include pSVT7 and pMT2. In some embodiments, vectors derived from bovine papilloma virus include pBV-1MTHA, and vectors derived from Epstein Bar virus include pHEBO, and p205. Other exemplary vectors include pMSG, pAV009/A⁺, pMTO01/A⁺, pMAMneo-5, baculovirus pDSVE, and any other vector allowing expression of proteins under the direction of the SV-40 early promoter, SV-40 later promoter, metallothionein promoter, murine mammary tumor virus promoter, Rous sarcoma virus promoter, polyhedrin promoter, or other promoters shown effective for expression in eukaryotic cells.

[0192] In some embodiments, recombinant viral vectors are useful for in vivo expression of the polypeptides of the present invention since they offer advantages such as lateral infection and targeting specificity. In one embodiment, lateral infection is inherent in the life cycle of, for example, retrovirus and is the process by which a single infected cell produces many progeny virions that bud off and infect neighboring cells. In one embodiment, the result is that a large area becomes rapidly infected, most of which was not initially infected by the original viral particles. In one embodiment, viral vectors are produced that are unable to spread laterally. In one embodiment, this characteristic can be useful if the desired purpose is to introduce a specified gene into only a localized number of targeted cells.

[0193] In one embodiment, various methods can be used to introduce the expression vector encoding the polypeptides of the present invention into cells. Such methods are generally described in Sambrook et al., Molecular Cloning: A Laboratory Manual, Cold Springs Harbor Laboratory, New York (1989, 1992), in Ausubel et al., Current Protocols in Molecular Biology, John Wiley and Sons, Baltimore, Md. (1989), Chang et al., Somatic Gene Therapy, CRC Press, Ann Arbor, Mich. (1995), Vega et al., Gene Targeting, CRC Press, Ann Arbor Mich. (1995), Vectors: A Survey of Molecular Cloning Vectors and Their Uses, Butterworths, Boston Mass. (1988) and Gilboa et at. [Biotechniques 4 (6): 504-512, 1986] and include, for example, stable or transient transfection, lipofection, electroporation and infection with recombinant viral vectors. In addition, see U.S. Pat. Nos. 5,464,764 and 5,487,992 for positive-negative selection methods.

[0194] In some embodiments, introduction of nucleic acid by viral infection offers several advantages over other methods such as lipofection and electroporation, since higher transfection efficiency can be obtained due to the infectious nature of viruses.

[0195] It will be appreciated that the activatable proproteins or polypeptides comprised thereby of the present invention can also be expressed from a nucleic acid construct administered to the individual employing any suitable mode of administration, described hereinabove (i.e., in-vivo gene therapy). In one embodiment, the nucleic acid construct is introduced into a suitable cell via an appropriate gene delivery vehicle/method (transfection, transduction, homologous recombination, etc.) and an expression system as needed and then the modified cells are expanded in culture and returned to the individual (i.e., ex-vivo gene therapy).

[0196] It will be appreciated that other than containing the necessary elements for the transcription and translation of the inserted coding sequence (encoding the polypeptide), the expression construct of the present invention can also include sequences engineered to optimize stability, production, purification, yield or activity of the expressed polypeptide.

[0197] In some embodiments, transformed cells are cultured under effective conditions, which allow for the expression of high amounts of an activatable proprotein or polypeptides that make up the same (i.e.—a first and a second polypeptide as further described herein). In some embodiments, effective culture conditions include, but are not limited to, effective media, bioreactor, temperature, pH and oxygen conditions that permit protein production. In one embodiment, an effective medium refers to any medium in which a cell is cultured to produce an activatable proprotein provided herein. In some embodiments, a medium typically includes an aqueous solution having assimilable carbon, nitrogen and phosphate sources, and appropriate salts, minerals, metals and other nutrients, such as vitamins. In some embodiments, cells of the present invention can be cultured in conventional fermentation bioreactors, shake flasks, test tubes, microtiter dishes and petri plates. In some embodiments, culturing is carried out at a temperature, pH and oxygen content appropriate for a recombinant cell. In some embodiments, culturing conditions are within the expertise of one of ordinary skill in the art.

[0198] In some embodiments, depending on the vector and host system used for production, the resultant polypeptides of the activatable proprotein provided herein either remain within a recombinant cell, are secreted into the fermentation medium, are secreted into a space between two cellular membranes, such as the periplasmic space in E. coli, or are retained on the outer surface of a cell or viral membrane. In another embodiment, following a predetermined time in culture, recovery of the activatable proprotein or polypeptides that make up the same (including any precursors) is effected.

[0199] In one embodiment, the phrase “recovering the activatable proprotein or polypeptides comprised by or that make up the same” used herein refers to collecting the whole fermentation medium containing the activatable proprotein/polypeptides and need not imply additional steps of separation or purification.

[0200] In one embodiment, an activatable proprotein or polypeptides that make up the same of the present invention are purified using a variety of standard protein purification techniques, such as, but not limited to, affinity chromatography, ion exchange chromatography, filtration, electrophoresis, hydrophobic interaction chromatography, gel filtration chromatography, reverse phase chromatography, concanavalin A chromatography, chromatofocusing and differential solubilization.

[0201] In one embodiment, to facilitate recovery, the expressed coding sequence can be engineered to encode an activatable proprotein of the present invention. In one embodiment, the activatable proprotein can be designed so that it can be readily isolated by affinity chromatography; e.g., by immobilization on a column specific for the cleavable moiety.

[0202] In one embodiment, an activatable proprotein of the present invention is retrieved in “substantially pure” form.

[0203] In one embodiment, the phrase “substantially pure” refers to a purity that allows for the effective use of an activatable proprotein in the applications described herein.

[0204] In one embodiment, an activatable proprotein provided herein can also be synthesized using in vitro expression systems. In one embodiment, in vitro synthesis methods are well known in the art and the components of the system are commercially available.

[0205] In some embodiments, once an activatable proprotein disclosed herein is synthesized and purified, their therapeutic efficacy can be assayed in vivo or in vitro.

[0206] In one embodiment, the pharmaceutical composition provided herein comprising an activatable proprotein of the invention is further formulated with a pharmaceutical carrier. As used herein, “pharmaceutical carrier” includes any and all solvents, dispersion media, coatings, antibacterial and antifungal agents, isotonic and absorption delaying agents, and the like that are physiologically compatible.

### Activatable Proproteins—Therapeutic Methods

[0207] Activatable proproteins described herein can be selected for use in methods of treatment of suitable subjects in need thereof. The activatable proproteins or pharmaceutical compositions provided herein can be administered by any suitable means, including oral, parenteral, subcutaneous, intraperitoneal, intrapulmonary, intranasal, spinal or epidermal administration (e.g. by injection or infusion), and, if desired for local injection (e.g., at the site of a solid tumor). Parenteral administration routes include intramuscular, intravenous, intraarterial, intraperitoneal, or subcutaneous administration.

[0208] In one embodiment, provided herein is a method comprising administering the activatable proprotein or the pharmaceutical composition disclosed herein to a subject having a cancer to prevent or treat the cancer in the subject, wherein following administration, the activatable proprotein is activated through protease cleavage in a cancerous tissue.

[0209] In another embodiment, provided herein is a method comprising administering the activatable proprotein or the pharmaceutical composition disclosed herein to a subject in need thereof, to elicit or enhance an anti-tumor immune response in the subject, wherein following administration, the activatable proprotein is activated through protease cleavage in the tumor.

[0210] In one embodiment, provided herein is a use of the activatable proprotein or the pharmaceutical composition disclosed herein for preventing or treating a cancer in a subject, comprising the step of administering the activatable proprotein or pharmaceutical composition, and wherein following administration, the activatable proprotein is activated through protease cleavage in a cancerous tissue.

[0211] In another embodiment, provided herein is a use of the activatable proprotein or the pharmaceutical composition disclosed herein for eliciting or enhancing an anti-tumor immune response in a subject, comprising the step of administering the activatable proprotein or pharmaceutical composition, and wherein following administration, the activatable proprotein is activated through protease cleavage in a tumor.

[0212] The term treatment site or disease site is meant to refer to a site at which an activatable proprotein is designed to be switchable, as described herein, e.g., a site at which a masking moiety is cleaved from the active domain. Treatment sites include tissues that can be accessed by local administration (e.g., injection, infusion (e.g., by catheter), etc.) or by systemic administration (e.g., administration to a site remote from a treatment site). Treatment sites include those that are relatively biologically confined (e.g., an organ, sac, tumor site, and the like).

[0213] In one embodiment, a disease disclosed herein is a cancer. In another embodiment, a cancer disclosed herein is selected from adrenocortical carcinoma, AIDS-related cancers, AIDS-related lymphoma, lymphoma, thyroid cancer, pancreatic cancer, anal cancer, anorectal cancer, cancer of the anal canal, appendix cancer, childhood cerebellar astrocytoma, childhood cerebral astrocytoma, basal cell carcinoma, biliary cancer, extrahepatic bile duct cancer, intrahepatic bile duct cancer, bladder cancer, urinary bladder cancer, bone and joint cancer, osteosarcoma and malignant fibrous histiocytoma, brain cancer, brain tumor, brain stem glioma, neuroblastoma, cerebellar astrocytoma, cerebral astrocytoma/malignant glioma, ependymoma, medulloblastoma, supratentorial primitive neuroectodermal tumors, visual pathway and hypothalamic glioma, breast cancer, bronchial adenomas/carcinoids, carcinoid tumor, gastrointestinal, nervous system cancer, nervous system lymphoma, central nervous system cancer, central nervous system lymphoma, cervical cancer, childhood cancers, leukemia, chronic lymphocytic leukemia, chronic myelogenous leukemia, chronic myeloproliferative disorders, colon cancer, colorectal cancer, cutaneous T-cell lymphoma, lymphoid neoplasm, mycosis fungoides, Seziary Syndrome, endometrial cancer, esophageal cancer, extracranial germ cell tumor, extragonadal germ cell tumor, extrahepatic bile duct cancer, eye cancer, retinoblastoma, gallbladder cancer, gastric (stomach) cancer, gastrointestinal carcinoid tumor, gastrointestinal stromal tumor (GIST), germ cell tumor, ovarian germ cell tumor, gestational trophoblastic tumor glioma, head and neck cancer, hepatocellular (liver) cancer, Hodgkin lymphoma, hypopharyngeal cancer, ocular cancer, islet cell tumors (endocrine pancreas), Kaposi Sarcoma, kidney cancer, renal cancer, kidney cancer, laryngeal cancer, acute lymphoblastic leukemia, acute myeloid leukemia, chronic lymphocytic leukemia, chronic myelogenous leukemia, hairy cell leukemia, lip and oral cavity cancer, lung cancer, non-small cell lung cancer, small cell lung cancer, AIDS-related lymphoma, non-Hodgkin lymphoma, primary central nervous system lymphoma, Waldenstroem macroglobulinemia, medulloblastoma, melanoma, intraocular (eye) melanoma, merkel cell carcinoma, mesothelioma malignant, mesothelioma, metastatic squamous neck cancer, mouth cancer, cancer of the tongue, multiple endocrine neoplasia syndrome, mycosis fungoides, myelodysplastic syndromes, myelodysplastic/myeloproliferative diseases, chronic myelogenous leukemia, acute myeloid leukemia, multiple myeloma, chronic myeloproliferative disorders, nasopharyngeal cancer, neuroblastoma, oral cancer, oral cavity cancer, oropharyngeal cancer, ovarian cancer, ovarian epithelial cancer, ovarian low malignant potential tumor, pancreatic cancer, islet cell pancreatic cancer, paranasal sinus and nasal cavity cancer, parathyroid cancer, penile cancer, pharyngeal cancer, pheochromocytoma, pineoblastoma and supratentorial primitive neuroectodermal tumors, pituitary tumor, plasma cell neoplasm/multiple myeloma, pleuropulmonary blastoma, prostate cancer, rectal cancer, renal pelvis and ureter, transitional cell cancer, retinoblastoma, rhabdomyosarcoma, salivary gland cancer, Ewing family of sarcoma tumors, Kaposi Sarcoma, soft tissue sarcoma, epithelioid sarcoma, synovial sarcoma, uterine cancer, uterine sarcoma, skin cancer (non-melanoma), skin cancer (melanoma), merkel cell skin carcinoma, small intestine cancer, soft tissue sarcoma, squamous cell carcinoma, stomach (gastric) cancer, supratentorial primitive neuroectodermal tumors, testicular cancer, throat cancer, thymoma, thymoma and thymic carcinoma, thyroid cancer, transitional cell cancer of the renal pelvis and ureter and other urinary organs, gestational trophoblastic tumor, urethral cancer, endometrial uterine cancer, uterine sarcoma, uterine corpus cancer, vaginal cancer, vulvar cancer, or Wilm's Tumor, or any tumor associated with, but not limited to, the type of cancer mentioned above, or any metastases following, but not limited to, any of the cancers mentioned above.

[0214] In one embodiment, the present invention provides a method of treating a disease or condition in a subject in need thereof, the method comprising administering a therapeutically effective amount of the activatable proprotein or the pharmaceutical composition disclosed herein.

[0215] In one embodiment, the present invention provides a method of treating a cancer or tumor disclosed herein in a subject in need thereof, the method comprising administering a therapeutically effective amount of the activatable proprotein or a pharmaceutical composition disclosed herein.

[0216] In one embodiment, the present invention provides a method of preventing, inhibiting, suppressing or delaying the onset of a cancer or tumor in a subject, the method comprising administering an effective amount of the activatable proprotein or the pharmaceutical composition described herein.

[0217] In some embodiments, treating a patient with a pharmaceutical composition comprising the activatable proprotein provided herein can result in increase in average survival time of a population of treated subjects in comparison to a population receiving monotherapy with a drug that is not a compound of the disclosure, or a pharmaceutically acceptable salt, solvate, analog or derivative thereof. Preferably, after treatment with the strategies, treatment modalities, methods, combinations, and compositions provided herein, the average survival time is increased by more than 30 days; more preferably, by more than 60 days; more preferably, by more than 90, 120, or 365 days; more preferably, by more than 365 days. An increase in average survival time of a population may be measured by any reproducible means. An increase in average survival time of a population may be measured, for example, by calculating for a population the average length of survival following initiation of treatment with an active compound. An increase in average survival time of a population may also be measured, for example, by calculating for a population the average length of survival following completion of a first round of treatment with the pharmaceutical composition disclosed herein.

[0218] In some embodiments, treating a patient with a pharmaceutical composition comprising the activatable proprotein provided herein can result in a decrease in the mortality rate of a population of treated subjects in comparison to a population receiving carrier alone. Treating cancer can result in a decrease in the mortality rate of a population of treated subjects in comparison to an untreated population. Treating cancer can result in a decrease in the mortality rate of a population of treated subjects in comparison to a population receiving monotherapy with a drug that is not a compound of the disclosure, or a pharmaceutically acceptable salt, solvate, analog or derivative thereof. Preferably, after treatment with the strategies, treatment modalities, methods, combinations, and compositions provided herein, the mortality rate is decreased by more than 2%; more preferably, by more than 5%; more preferably, by more than 10%; and most preferably, by more than 25%. A decrease in the mortality rate of a population of treated subjects may be measured by any reproducible means. A decrease in the mortality rate of a population may be measured, for example, by calculating for a population the average number of disease-related deaths per unit time following initiation of treatment with an active compound. A decrease in the mortality rate of a population may also be measured, for example, by calculating for a population the average number of disease-related deaths per unit time following completion of a first round of treatment with the pharmaceutical composition disclosed herein.

### Activatable Proprotein—Administration, Dosing

[0219] An activatable proprotein or pharmaceutical composition comprising the same can be parenterally administered to a subject in need thereof, or can be administered by a variety of methods known in the art. As will be appreciated by the skilled artisan, the route and/or mode of administration will vary depending upon the desired results. To administer a compound of the invention by certain routes of administration, it may be necessary to coat the compound with, or co-administer the compound with, a material to prevent its inactivation. For example, the compound may be administered to a subject in an appropriate carrier, for example, liposomes, or a diluent. Pharmaceutically acceptable diluents include saline and aqueous buffer solutions. Pharmaceutical carriers include sterile aqueous solutions or dispersions and sterile powders for the extemporaneous preparation of sterile injectable solutions or dispersion. The use of such media and agents for pharmaceutically active substances is known in the art.

[0220] In typical embodiments, preparations for administration to subjects include sterile aqueous or non-aqueous solutions, suspensions, and emulsions. Some embodiments include non-aqueous solvents such as propylene glycol, polyethylene glycol, vegetable oils (e.g., olive oils), organic esters (e.g., ethyl oleate) and other solvents known to those of skill in the art. Physiologically acceptable carriers (or excipients) are optionally used in certain embodiments of the invention. Examples of such include, e.g., saline, PBS, Ringer's solution, lactated Ringer's solution, etc. Additionally, preservatives and additives are optionally added to the compositions to help ensure stability and sterility. For example, antibiotics and other bactericides, antioxidants, chelating agents, and the like are all optionally present in various embodiments of the compositions herein.

[0221] The phrases “parenteral administration” and “administered parenterally” as used herein means modes of administration other than enteral and topical administration, usually by injection, and includes, without limitation, intravenous, intramuscular, intra-arterial, intrathecal, intracapsular, intraorbital, intracardiac, intradermal, intraperitoneal, transtracheal, subcutaneous, subcuticular, intra-articular, subcapsular, subarachnoid, intraspinal, epidural and intrasternal injection and infusion.

[0222] Regardless of the route of administration selected, the compounds of the present invention, which may be used in a suitable hydrated form, and/or the pharmaceutical compositions of the present invention, are formulated into pharmaceutically acceptable dosage forms by conventional methods known to those of skill in the art.

[0223] The activatable proprotein, or pharmaceutical composition comprising the same are optionally administered to subjects in need of treatment (either therapeutically or prophylactically) in any appropriate sterile pharmaceutical carrier. Such pharmaceutical carrier acts to maintain the solubility and action of then activatable proprotein. In some embodiments, it may be desired to administer additional components in conjunction with the activatable proprotein. For example, in some treatment regimes, chemotherapeutic agents, antibiotics, additional formulations comprising the activatable proprotein provided herein and one or more standard of care agents, etc. are all optionally included with the compositions of the invention.

[0224] As used herein, the terms “combination treatment,” “combination therapy,” and “co-therapy” are used interchangeably and generally refer to treatment modalities featuring an activatable proprotein or pharmaceutical composition comprising the same as provided herein and an additional therapeutic agent. Typically, combination treatment modalities are part of a specific treatment regimen intended to provide a beneficial effect from the concurrent action of the therapeutic agent combination. The beneficial effect of the combination may include, but is not limited to, pharmacokinetic or pharmacodynamic co-action resulting from the combination of therapeutic agents. Administration of these therapeutic agents in combination typically is carried out over a defined time period (usually minutes, hours, days or weeks depending upon the combination selected). In some embodiments, combination treatment comprises administration of two or more therapeutic agents in a sequential manner, wherein each therapeutic agent is administered at a different time, as well as administration of these therapeutic agents, or at least two of the therapeutic agents, in a substantially simultaneous manner. Substantially simultaneous administration can be accomplished, for example, by administering to the subject a single dosage form having a fixed ratio of each therapeutic agent or in multiple, separate dosage forms for the therapeutic agents. Sequential or substantially simultaneous administration of each therapeutic agent can be effected by any appropriate route including, but not limited to, oral routes, intravenous routes, intramuscular routes, and direct absorption through mucous membrane tissues. The therapeutic agents can be administered by the same route or by different routes. The therapeutic agents can be administered according to the same or to a different administration interval. For example, a first therapeutic agent of the combination selected may be administered by intravenous injection while the other therapeutic agents of the combination may be administered orally. Alternatively, for example, all therapeutic agents may be administered orally or all therapeutic agents may be administered by intravenous injection.

[0225] In some embodiments, combination therapy also embraces the administration of the therapeutic agents as described above in further combination with other biologically active ingredients and non-drug therapies (e.g., surgery or radiation treatment). Where the combination therapy further comprises a non-drug treatment, the non-drug treatment may be conducted at any suitable time so long as a beneficial effect from the co-action of the combination of the therapeutic agents and non-drug treatment is achieved. For example, in appropriate cases, the beneficial effect is still achieved when the non-drug treatment is temporally removed from the administration of the therapeutic agents, perhaps by days or even weeks.

[0226] In some embodiments, the additional therapeutic agent is a chemotherapeutic agent (also referred to as an anti-neoplastic agent or anti-proliferative agent), e.g., an alkylating agent; an antibiotic; an anti-metabolite; a detoxifying agent; an interferon; a polyclonal or monoclonal antibody; an EGFR inhibitor; a HER2 inhibitor; a histone deacetylase inhibitor; a hormone; a mitotic inhibitor; an MTOR inhibitor; a multi-kinase inhibitor; a serine/threonine kinase inhibitor; a tyrosine kinase inhibitors; a VEGF/VEGFR inhibitor; a taxane or taxane derivative, an aromatase inhibitor, an anthracycline, a microtubule targeting drug, a topoisomerase poison drug, an inhibitor of a molecular target or enzyme (e.g., a kinase or a protein methyltransferase), a cytidine analogue drug or any chemotherapeutic, an immune checkpoint inhibitor, or any anti-neoplastic or anti-proliferative agent known to those of skill in the art.

[0227] Exemplary alkylating agents suitable for use according to the combination treatment modalities provided herein include, but are not limited to, cyclophosphamide (Cytoxan; Neosar); chlorambucil (Leukeran); melphalan (Alkeran); carmustine (BiCNU); busulfan (Busulfex); lomustine (CeeNU); dacarbazine (DTIC-Dome); oxaliplatin (Eloxatin); carmustine (Gliadel); ifosfamide (Ifex); mechlorethamine (Mustargen); busulfan (Myleran); carboplatin (Paraplatin); cisplatin (CDDP; Platinol); temozolomide (Temodar); thiotepa (Thioplex); bendamustine (Treanda); or streptozocin (Zanosar).

[0228] Exemplary suitable anthracyclines include, but are not limited to, doxorubicin (Adriamycin); doxorubicin liposomal (Doxil); mitoxantrone (Novantrone); bleomycin (Blenoxane); daunorubicin (Cerubidine); daunorubicin liposomal (DaunoXome); dactinomycin (Cosmegen); epirubicin (Ellence); idarubicin (Idamycin); plicamycin (Mithracin); mitomycin (Mutamycin); pentostatin (Nipent); or valrubicin (Valstar).

[0229] Exemplary anti-metabolites include, but are not limited to, fluorouracil (Adrucil); capecitabine (Xeloda); hydroxyurea (Hydrea); mercaptopurine (Purinethol); pemetrexed (Alimta); fludarabine (Fludara); nelarabine (Arranon); cladribine (Cladribine Novaplus); clofarabine (Clolar); cytarabine (Cytosar-U); decitabine (Dacogen); cytarabine liposomal (DepoCyt); hydroxyurea (Droxia); pralatrexate (Folotyn); floxuridine (FUDR); gemcitabine (Gemzar); cladribine (Leustatin); fludarabine (Oforta); methotrexate (MTX; Rheumatrex); methotrexate (Trexall); thioguanine (Tabloid); TS-1 or cytarabine (Tarabine PFS).

[0230] Exemplary detoxifying agents include, but are not limited to, amifostine (Ethyol) or mesna (Mesnex).

[0231] Exemplary interferons include, but are not limited to, interferon alfa-2b (Intron A) or interferon alfa-2a (Roferon-A).

[0232] Exemplary polyclonal or monoclonal antibodies include, but are not limited to, trastuzumab (Herceptin); ofatumumab (Arzerra); bevacizumab (Avastin); rituximab (Rituxan); cetuximab (Erbitux); panitumumab (Vectibix); tositumomab/iodine-131 tositumomab (Bexxar); alemtuzumab (Campath); ibritumomab (Zevalin; In-111; Y-90 Zevalin); gemtuzumab (Mylotarg); eculizumab (Soliris) or denosumab.

[0233] Exemplary EGFR inhibitors include, but are not limited to, gefitinib (Iressa); lapatinib (Tykerb); cetuximab (Erbitux); erlotinib (Tarceva); panitumumab (Vectibix); PKI-166; canertinib (CI-1033); matuzumab (EMD 72000) or EKB-569.

[0234] Exemplary HER2 inhibitors include, but are not limited to, trastuzumab (Herceptin); lapatinib (Tykerb) or AC-480.

[0235] Histone Deacetylase Inhibitors include, but are not limited to, vorinostat (Zolinza).

[0236] Exemplary hormones include, but are not limited to, tamoxifen (Soltamox; Nolvadex); raloxifene (Evista); megestrol (Megace); leuprolide (Lupron; Lupron Depot; Eligard; Viadur); fulvestrant (Faslodex); letrozole (Femara); triptorelin (Trelstar LA; Trelstar Depot); exemestane (Aromasin); goserelin (Zoladex); bicalutamide (Casodex); anastrozole (Arimidex); fluoxymesterone (Androxy; Halotestin); medroxyprogesterone (Provera; Depo-Provera); estramustine (Emcyt); flutamide (Eulexin); toremifene (Fareston); degarelix (Firmagon); nilutamide (Nilandron); abarelix (Plenaxis); or testolactone (Teslac).

[0237] Exemplary mitotic inhibitors include, but are not limited to, paclitaxel (Taxol; Onxol; Abraxane); docetaxel (Taxotere); vincristine (Oncovin; Vincasar PFS); vinblastine (Velban); etoposide (Toposar; Etopophos; VePesid); teniposide (Vumon); ixabepilone (Ixempra); nocodazole; epothilone; vinorelbine (Navelbine); camptothecin (CPT); irinotecan (Camptosar); topotecan (Hycamtin); amsacrine or lamellarin D (LAM-D).

[0238] Exemplary MTOR inhibitors include, but are not limited to, everolimus (Afinitor) or temsirolimus (Torisel); rapamune, ridaforolimus; or AP23573.

[0239] Exemplary multi-kinase inhibitors include, but are not limited to, sorafenib (Nexavar); sunitinib (Sutent); BIBW 2992; E7080; Zd6474; PKC-412; motesanib; or AP24534.

[0240] Exemplary serine/threonine kinase inhibitors include, but are not limited to, ruboxistaurin; eril/fasudil hydrochloride; flavopiridol; seliciclib (CYC202; Roscovitine); SNS-032 (BMS-387032); Pkc412; bryostatin; KAI-9803; SF1126; VX-680; Azd1152; Arry-142886 (AZD-6244); SCIO-469; GW681323; CC-401; CEP-1347 or PD 332991.

[0241] Exemplary tyrosine kinase inhibitors include, but are not limited to, erlotinib (Tarceva); gefitinib (Iressa); imatinib (Gleevec); sorafenib (Nexavar); sunitinib (Sutent); trastuzumab (Herceptin); bevacizumab (Avastin); rituximab (Rituxan); lapatinib (Tykerb); cetuximab (Erbitux); panitumumab (Vectibix); everolimus (Afinitor); alemtuzumab (Campath); gemtuzumab (Mylotarg); temsirolimus (Torisel); pazopanib (Votrient); dasatinib (Sprycel); nilotinib (Tasigna); vatalanib (Ptk787; ZK222584); CEP-701; SU5614; MLN518; XL999; VX-322; Azd0530; BMS-354825; SKI-606 CP-690; AG-490; WHI-P154; WHI-P131; AC-220; or AMG888.

[0242] Exemplary VEGF/VEGFR inhibitors include, but are not limited to, bevacizumab (Avastin); sorafenib (Nexavar); sunitinib (Sutent); ranibizumab; pegaptanib; or vandetinib.

[0243] Exemplary microtubule targeting drugs include, but are not limited to, paclitaxel, docetaxel, vincristin, vinblastin, nocodazole, epothilones and navelbine.

[0244] Exemplary topoisomerase poison drugs include, but are not limited to, teniposide, etoposide, adriamycin, camptothecin, daunorubicin, dactinomycin, mitoxantrone, amsacrine, epirubicin and idarubicin.

[0245] Exemplary taxanes or taxane derivatives include, but are not limited to, paclitaxel and docetaxol.

[0246] Exemplary general chemotherapeutic, anti-neoplastic, anti-proliferative agents include, but are not limited to, altretamine (Hexalen); isotretinoin (Accutane; Amnesteem; Claravis; Sotret); tretinoin (Vesanoid); azacitidine (Vidaza); bortezomib (Velcade) asparaginase (Elspar); levamisole (Ergamisol); mitotane (Lysodren); procarbazine (Matulane); pegaspargase (Oncaspar); denileukin diftitox (Ontak); porfimer (Photofrin); aldesleukin (Proleukin); lenalidomide (Revlimid); bexarotene (Targretin); thalidomide (Thalomid); temsirolimus (Torisel); arsenic trioxide (Trisenox); verteporfin (Visudyne); mimosine (Leucenol); (1M tegafur—0.4 M 5-chloro-2,4-dihydroxypyrimidine—1 M potassium oxonate) or lovastatin.

[0247] In some embodiments, combination treatment modalities are provided in which the additional therapeutic agent is a cytokine, e.g., G-CSF (granulocyte colony stimulating factor). In another aspect, a pharmaceutical composition provided herein may be administered in combination with radiation therapy. Radiation therapy can also be administered in combination with a pharmaceutical composition provided herein and another chemotherapeutic agent described herein as part of a multi-agent therapy. In yet another aspect, a pharmaceutical composition provided herein may be administered in combination with standard chemotherapy combinations such as, but not restricted to, CMF (cyclophosphamide, methotrexate and 5-fluorouracil), CAF (cyclophosphamide, adriamycin and 5-fluorouracil), AC (adriamycin and cyclophosphamide), FEC (5-fluorouracil, epirubicin, and cyclophosphamide), ACT or ATC (adriamycin, cyclophosphamide, and paclitaxel), rituximab, Xeloda (capecitabine), Cisplatin (CDDP), Carboplatin, TS-1 (tegafur, gimestat and otastat potassium at a molar ratio of 1:0.4:1), Camptothecin-11 (CPT-11, Irinotecan or Camptosar™), CHOP (cyclophosphamide, hydroxydaunorubicin, oncovin, and prednisone or prednisolone), R-CHOP (rituximab, cyclophosphamide, hydroxydaunorubicin, oncovin, prednisone or prednisolone), or CMFP (cyclophosphamide, methotrexate, 5-fluorouracil and prednisone).

[0248] In some embodiments, a pharmaceutical composition provided herein may be administered with an inhibitor of an enzyme, such as a receptor or non-receptor kinase. Receptor and non-receptor kinases are, for example, tyrosine kinases or serine/threonine kinases. Kinase inhibitors described herein are small molecules, polynucleic acids, polypeptides, or antibodies.

[0249] Exemplary kinase inhibitors include, but are not limited to, Bevacizumab (targets VEGF), BIBW 2992 (targets EGFR and Erb2), Cetuximab/Erbitux (targets Erb1), Imatinib/Gleevec (targets Bcr-Abl), Trastuzumab (targets Erb2), Gefitinib/Iressa (targets EGFR), Ranibizumab (targets VEGF), Pegaptanib (targets VEGF), Erlotinib/Tarceva (targets Erb1), Nilotinib (targets Bcr-Abl), Lapatinib (targets Erb1 and Erb2/Her2), GW-572016/lapatinib ditosylate (targets HER2/Erb2), Panitumumab/Vectibix (targets EGFR), Vandetinib (targets RET/VEGFR), E7080 (multiple targets including RET and VEGFR), Herceptin (targets HER2/Erb2), PKI-166 (targets EGFR), Canertinib/CI-1033 (targets EGFR), Sunitinib/SU-11464/Sutent (targets EGFR and FLT3), Matuzumab/Emd7200 (targets EGFR), EKB-569 (targets EGFR), Zd6474 (targets EGFR and VEGFR), PKC-412 (targets VEGR and FLT3), Vatalanib/Ptk787/ZK222584 (targets VEGR), CEP-701 (targets FLT3), SU5614 (targets FLT3), MLN518 (targets FLT3), XL999 (targets FLT3), VX-322 (targets FLT3), Azd0530 (targets SRC), BMS-354825 (targets SRC), SKI-606 (targets SRC), CP-690 (targets JAK), AG-490 (targets JAK), WHI-P154 (targets JAK), WHI-P131 (targets JAK), sorafenib/Nexavar (targets RAF kinase, VEGFR-1, VEGFR-2, VEGFR-3, PDGFR- 3, KIT, FLT-3, and RET), Dasatinib/Sprycel (BCR/ABL and Src), AC-220 (targets Flt3), AC-480 (targets all HER proteins, “panHER”), Motesanib diphosphate (targets VEGF1-3, PDGFR, and c-kit), Denosumab (targets RANKL, inhibits SRC), AMG888 (targets HER3), and AP24534 (multiple targets including Flt3).

[0250] In another embodiment, an activatable proprotein or pharmaceutical composition comprising the same polypeptide disclosed herein is administered to a subject once a day. In some embodiments, the activatable proprotein or pharmaceutical composition comprising the same is administered to a subject once every two days. In another embodiment, the activatable proprotein or pharmaceutical composition comprising the same is administered to a subject once every three days. In another embodiment, the activatable proprotein or pharmaceutical composition comprising the same is administered to a subject once every four days. In another embodiment, the activatable proprotein or pharmaceutical composition comprising the same is administered to a subject once every five days. In another embodiment, the activatable proprotein or pharmaceutical composition comprising the same polypeptide is administered to a subject once every six days. In another embodiment, the activatable proprotein or pharmaceutical composition comprising the same is administered to a subject once every week. In another embodiment, the activatable proprotein or pharmaceutical composition comprising the same is administered to a subject once every 7-14 days. In another embodiment, the activatable proprotein or pharmaceutical composition comprising the same is administered to a subject once every 10-20 days. In another embodiment, the activatable proprotein or pharmaceutical composition comprising the same is administered to a subject once every 5-15 days. In another embodiment, the activatable proprotein or pharmaceutical composition comprising the same is administered to a subject once every 15-30 days.

[0251] In one embodiment, a dose of an activatable proprotein of the present invention comprises from 0.005 to 0.1 milligrams/kg in an injectable solution. In another embodiment, the dose comprises from 0.005 to 0.5 milligrams/kg of the activatable proprotein. In another embodiment, the dose comprises from 0.05 to 0.1 micrograms of the activatable proprotein. In another embodiment, the dose comprises from 0.005 to 0.1 milligrams/kg of the activatable proprotein in an injectable solution.

[0252] In another embodiment, an activatable proprotein or pharmaceutical composition comprising the same is administered to a subject in a dose ranging from 0.0001 mg to 0.6 mg. In another embodiment, the activatable proprotein or pharmaceutical composition comprising the same is administered to a subject in a dose ranging from 0.001 mg to 0.005 mg. In another embodiment, the activatable proprotein or pharmaceutical composition comprising the same is administered to a subject in a dose ranging from 0.005 mg to 0.01 mg. In another embodiment, the activatable proprotein or pharmaceutical composition comprising the same is administered to a subject in a dose ranging from 0.01 mg to 0.3 mg. In another embodiment, the activatable proprotein or pharmaceutical composition comprising the same is administered to a subject in a dose ranging from 0.2 mg to 0.6 mg.

[0253] In another embodiment, an activatable proprotein or pharmaceutical composition comprising the same is administered to a subject in a dose ranging from 1-100 mcg/kg. In another embodiment, the activatable proprotein or pharmaceutical composition comprising the same is administered to a subject in a dose ranging from 10-80 mcg/kg. In another embodiment, the activatable proprotein or pharmaceutical composition comprising the same is administered to a subject in a dose ranging from 20-60 mcg/kg. In another embodiment, the activatable proprotein or pharmaceutical composition comprising the same is administered to a subject in a dose ranging from 10-50 mcg/kg. In another embodiment, the activatable proprotein or pharmaceutical composition comprising the same is administered to a subject in a dose ranging from 40-80 mcg/kg. In another embodiment, the activatable proprotein or pharmaceutical composition comprising the same is administered to a subject in a dose ranging from 10-30 mcg/kg. In another embodiment, the activatable proprotein or pharmaceutical composition comprising the same is administered to a subject in a dose ranging from 30-60 mcg/kg.

[0254] In another embodiment, an activatable proprotein or pharmaceutical composition comprising the same is administered to a subject in a dose ranging from 0.1 mcg/kg to 100 mg/kg. In another embodiment, the activatable proprotein or pharmaceutical composition comprising the same is administered to a subject in a dose ranging from 0.1 mcg/kg to 50 mg/kg. In another embodiment, the activatable proprotein or pharmaceutical composition comprising the same is administered to a subject in a dose ranging from 0.1 mcg/kg to 25 mg/kg. In another embodiment, the activatable proprotein or pharmaceutical composition comprising the same is administered to a subject in a dose ranging from 0.1 mcg/kg to 10 mg/kg. In another embodiment, the activatable proprotein or pharmaceutical composition comprising the same is administered to a subject in a dose ranging from 0.1 mcg/kg to 5 mg/kg. In another embodiment, the activatable proprotein or pharmaceutical composition comprising the same is administered to a subject in a dose ranging from 0.1 mcg/kg to 1 mg/kg. In another embodiment, the activatable proprotein or pharmaceutical composition comprising the same is administered to a subject in a dose ranging from 0.1 mcg/kg to 0.1 mg/kg.

[0255] In another embodiment, an activatable proprotein or pharmaceutical composition comprising the same is administered to a subject in a dose ranging from 0.2 mg to 2 mg. In another embodiment, the activatable proprotein or pharmaceutical composition comprising the same is administered to a subject in a dose ranging from 2 mg to 6 mg. In another embodiment, the activatable proprotein or pharmaceutical composition comprising the same is administered to a subject in a dose ranging from 4 mg to 10 mg. In another embodiment, the activatable proprotein or pharmaceutical composition comprising the same is administered to a subject in a dose ranging from 5 mg and 15 mg.

[0256] In one embodiment, an activatable proprotein or pharmaceutical composition comprising the same is administered to a subject in a dose ranging from 10 μg/kg-1000 μg/kg. In another embodiment, an activatable proprotein or pharmaceutical composition comprising the same is administered to a subject in a dose ranging from 25 μg/kg-600 μg/kg. In another embodiment, an activatable proprotein or pharmaceutical composition comprising the same is administered to a subject in a dose ranging from 50 μg/kg-400 μg/kg. In another embodiment, an activatable proprotein or pharmaceutical composition comprising the same is administered to a subject in a dose of about 25 μg/kg. In another embodiment, an activatable proprotein or pharmaceutical composition comprising the same is administered to a subject in a dose of about 50 μg/kg. In another embodiment, an activatable proprotein or pharmaceutical composition comprising the same is administered to a subject in a dose of about 100 μg/kg. In another embodiment, an activatable proprotein or pharmaceutical composition comprising the same is administered to a subject in a dose of about 200 μg/kg. In another embodiment, an activatable proprotein or pharmaceutical composition comprising the same is administered to a subject in a dose of about 300 μg/kg. In another embodiment, an activatable proprotein or pharmaceutical composition comprising the same is administered to a subject in a dose of about 400 μg/kg. In another embodiment, an activatable proprotein or pharmaceutical composition comprising the same is administered to a subject in a dose of about 500 μg/kg. In another embodiment, an activatable proprotein or pharmaceutical composition comprising the same is administered to a subject in a dose of about 600 μg/kg.

[0257] In one embodiment, a single one time dose of the activatable proprotein or pharmaceutical composition comprising the same is administered to a subject. In another embodiment, a total of two doses are administered to the subject. In another embodiment, a total of two or more doses are administered to the subject.

[0258] In another embodiment, a dose of an activatable proprotein or pharmaceutical composition comprising the same is administered to a subject at least once a day. In another embodiment, a dose of the activatable proprotein or pharmaceutical composition comprising the same is administered to a subject at least once every two days. In another embodiment, a dose of the activatable proprotein or pharmaceutical composition comprising the same is administered to a subject at least once a every two or more days. In another embodiment, a dose of the activatable proprotein or pharmaceutical composition comprising the same is administered to a subject every week, biweekly or every three weeks. In another embodiment, a dose of the activatable proprotein or pharmaceutical composition comprising the same is administered to a subject at least once a week. In another embodiment, a dose of the activatable proprotein or pharmaceutical composition comprising the same is administered to a subject at least once every two weeks. In another embodiment, a dose of the activatable proprotein or pharmaceutical composition comprising the same is administered to a subject at least once every three weeks. In another embodiment, a dose of the activatable proprotein or pharmaceutical composition comprising the same is administered to a subject at least once every three or more weeks. In another embodiment, a dose of the activatable proprotein or pharmaceutical composition comprising the same is administered to a subject two or more times a week. In another embodiment, a dose of the activatable proprotein or pharmaceutical composition comprising the same is administered to a subject two or more times a month. In another embodiment, a dose of the activatable proprotein or pharmaceutical composition comprising the same is administered to a subject two or more times a year. In another embodiment, a dose of the activatable proprotein or pharmaceutical composition comprising the same is administered to a subject two or more times every two years. In another embodiment, a dose of the activatable proprotein or pharmaceutical composition comprising the same is administered to a subject two or more times every two or more years.

[0259] In another embodiment, a dose of an activatable proprotein or pharmaceutical composition comprising the same is administered at least once every 36 hours. In another embodiment, a dose of the activatable proprotein or pharmaceutical composition comprising the same is administered at least once every 48 hours. In another embodiment, a dose of the activatable proprotein or pharmaceutical composition comprising the same is administered at least once every 60 hours. In another embodiment, a dose of the activatable proprotein or pharmaceutical composition comprising the same is administered at least once every 72 hours. In another embodiment, a dose of the activatable proprotein or pharmaceutical composition comprising the same is administered at least once every 84 hours. In another embodiment, a dose of the activatable proprotein or pharmaceutical composition comprising the same is administered at least once every 96 hours. In another embodiment, a dose of the activatable proprotein or pharmaceutical composition comprising the same is administered at least once every 5 days. In another embodiment, a dose of the activatable proprotein or pharmaceutical composition comprising the same is administered at least once every 6 days. In another embodiment, a dose of the activatable proprotein or pharmaceutical composition comprising the same is administered at least once every 7 days. In another embodiment, a dose of the activatable proprotein or pharmaceutical composition comprising the same is administered at least once every 8-10 days. In another embodiment, a dose of the activatable proprotein or pharmaceutical composition comprising the same is administered at least once every 10-12 days. In another embodiment, a dose of the activatable proprotein or pharmaceutical composition comprising the same is administered at least once every 12-15 days. In another embodiment, a dose of the activatable proprotein or pharmaceutical composition comprising the same is administered at least once every 15-25 days. In another embodiment, a dose of the activatable proprotein or pharmaceutical composition comprising the same is administered at least once every 20-30 days.

[0260] In one embodiment, a dose of an activatable proprotein or pharmaceutical composition comprising the same is administered to a subject at least once every 1 month. In one embodiment, a dose of the activatable proprotein or pharmaceutical composition comprising the same is administered at least once every 2 months. In one embodiment, a dose of the activatable proprotein or pharmaceutical composition comprising the same is administered at least once every 3 months. In one embodiment, a dose of the activatable proprotein or pharmaceutical composition comprising the same is administered at least once every 4 months. In one embodiment, a dose of the activatable proprotein or pharmaceutical composition comprising the same is administered at least once every 5 months. In one embodiment, a dose of the activatable proprotein or pharmaceutical composition comprising the same is administered at least once every 6 months. In one embodiment, a dose of the activatable proprotein or pharmaceutical composition comprising the same is administered at least once every 6-12 months. In another embodiment, a dose of the activatable proprotein or pharmaceutical composition comprising the same is administered quarterly. In another embodiment, the dose is administered daily, weekly, biweekly, monthly or annually. In another embodiment, the dose is administered once, twice, or two or more times a day, a week, a month or a year. In another embodiment, the dose is administered every two, three, four, or at least five years.

[0261] In one embodiment, repeat administrations (doses) of compositions of this invention may be undertaken immediately following the first course of treatment or after an interval of days, weeks, or years to achieve the desired effect as further provided herein (e.g. to prevent or treat cardiovascular disease or condition, or a CNS-related disease or condition).

[0262] In one embodiment, the pharmaceutical compositions are administered by intravenous, intra-arterial, subcutaneous or intramuscular injection of a liquid preparation. In another embodiment, liquid formulations include solutions, suspensions, dispersions, emulsions, oils and the like. In one embodiment, the pharmaceutical compositions are administered intravenously, and are thus formulated in a form suitable for intravenous administration. In another embodiment, the pharmaceutical compositions are administered intra-arterially, and are thus formulated in a form suitable for intra-arterial administration.

[0263] In some embodiments, compositions for use in the methods disclosed herein comprise solutions or emulsions, which in some embodiments are aqueous solutions or emulsions comprising a safe and effective amount of the compounds disclosed herein and optionally, other compounds, intended for intravenous or subcutaneous administration.

[0264] In some embodiments, the various constituents of the compositions come pre-measured and/or prepackaged and/or ready for use without additional measurement, etc. The present invention also optionally comprises kits for conducting/using the methods and/or the compositions of the invention. Additionally, such kits can also comprise appropriate excipients (e.g., pharmaceutically acceptable excipients) for performing therapeutic and/or prophylactic treatments of the invention. Such kits optionally contain additional components for the assembly and/or use of the compositions of the invention including, but not limited to, e.g., diluents, etc.

[0265] The compositions described herein are optionally packaged to include all (or almost all) necessary components for performing the methods of the invention or for using the compositions of the invention (optionally including, e.g., written instructions for the use of the methods/compositions of the invention). For example, the kits can optionally include such components as, e.g., buffers, reagents, serum proteins, antibodies, substrates, etc. In the case of prepackaged reagents, the kits optionally include pre-measured or pre-dosed amounts that are ready to incorporate into the methods without measurement, e.g., pre-measured fluid aliquots, or pre-weighed or pre-measured solid reagents that can be easily reconstituted by the end-user of the kit.

[0266] Such kits also typically include appropriate instructions for performing the methods of the invention and/or using the compositions of the invention. In some embodiments, the components of the kits/packages are provided in a stabilized form, so as to prevent degradation or other loss during prolonged storage, e.g., from leakage. A number of stabilizing processes/agents are widely used for reagents, etc. that are to be stored, such as the inclusion of chemical stabilizers (i.e., enzymatic inhibitors, microbicides/bacteriostats, anticoagulants), etc. Actual dosage levels of the active ingredients in the pharmaceutical compositions of the present invention may be varied so as to obtain an amount of the active ingredient which is effective to achieve the desired therapeutic response for a particular patient, composition, and mode of administration, without being toxic to the patient. The selected dosage level will depend upon a variety of pharmacokinetic factors including the activity of the particular compositions of the present invention employed, the route of administration, the time of administration, the rate of excretion of the particular compound being employed, the duration of the treatment, other drugs, compounds and/or materials used in combination with the particular compositions employed, the age, sex, weight, condition, general health and prior medical history of the patient being treated, and like factors well known in the medical arts.

[0267] The composition must be sterile and fluid to the extent that the composition is deliverable by syringe. In addition to water, the carrier preferably is an isotonic buffered saline solution. Proper fluidity can be maintained, for example, by use of coating such as lecithin, by maintenance of required particle size in the case of dispersion and by use of surfactants. In many cases, it is preferable to include isotonic agents, for example, sugars, polyalcohols such as mannitol or sorbitol, and sodium chloride in the composition.

[0268] Actual dosage levels of the active ingredients in the pharmaceutical compositions of the present invention may be varied so as to obtain an amount of the active ingredient which is effective to achieve the desired therapeutic response for a particular patient, composition, and mode of administration, without being toxic to the patient. The selected dosage level will depend upon a variety of pharmacokinetic factors including the activity of the particular compositions of the present invention employed, the route of administration, the time of administration, the rate of excretion of the particular compound being employed, the duration of the treatment, other drugs, compounds and/or materials used in combination with the particular compositions employed, the age, sex, weight, condition, general health and prior medical history of the patient being treated, and like factors well known in the medical arts.

[0269] While several inventive embodiments have been described and illustrated herein, those of ordinary skill in the art will readily envision a variety of other means and/or structures for performing the function and/or obtaining the results and/or one or more of the advantages described herein, and each of such variations and/or modifications is deemed to be within the scope of the inventive embodiments described herein. More generally, those skilled in the art will readily appreciate that all parameters, dimensions, materials, and configurations described herein are meant to be exemplary and that the actual parameters, dimensions, materials, and/or configurations will depend upon the specific application or applications for which the inventive teachings is/are used. Those skilled in the art will recognize, or be able to ascertain using no more than routine experimentation, many equivalents to the specific inventive embodiments described herein. It is, therefore, to be understood that the foregoing embodiments are presented by way of example only and that within the scope of the appended claims and equivalents thereto, inventive embodiments may be practiced otherwise than as specifically described and claimed. Inventive embodiments of the present disclosure are directed to each individual feature, system, article, material, kit, and/or method described herein. In addition, any combination of two or more such features, systems, articles, materials, kits, and/or methods, if such features, systems, articles, materials, kits, and/or methods are not mutually inconsistent, is included within the inventive scope of the present disclosure.

[0270] All definitions, as defined and used herein, should be understood to control over dictionary definitions, definitions in documents incorporated by reference, and/or ordinary meanings of the defined terms.

[0271] All references, patents and patent applications disclosed herein are incorporated by reference with respect to the subject matter for which each is cited, which in some cases may encompass the entirety of the document.

[0272] The indefinite articles “a” and “an,” as used herein in the specification and in the claims, unless clearly indicated to the contrary, should be understood to mean “at least one.”

[0273] The phrase “and/or,” as used herein in the specification and in the claims, should be understood to mean “either or both” of the elements so conjoined, i.e., elements that are conjunctively present in some cases and disjunctively present in other cases. Multiple elements listed with “and/or” should be construed in the same fashion, i.e., “one or more” of the elements so conjoined. Other elements may optionally be present other than the elements specifically identified by the “and/or” clause, whether related or unrelated to those elements specifically identified. Thus, as a non-limiting example, a reference to “A and/or B”, when used in conjunction with open-ended language such as “comprising” can refer, in one embodiment, to A only (optionally including elements 5 other than B); in another embodiment, to B only (optionally including elements other than A); in yet another embodiment, to both A and B (optionally including other elements); etc.

[0274] As used herein in the specification and in the claims, the phrase “at least one,” in reference to a list of one or more elements, should be understood to mean at least one element selected from any one or more of the elements in the list of elements, but not necessarily including at least one of each and every element specifically listed within the list of elements and not excluding any combinations of elements in the list of elements. This definition also allows that elements may optionally be present other than the elements specifically identified within the list of elements to which the phrase “at least one” refers, whether related or unrelated to those elements specifically identified. Thus, as a non-limiting example, “at least one of A and B” (or, equivalently, “at least one of A or B,” or, equivalently “at least one of A and/or B”) can refer, in one embodiment, to at least one, optionally including more than one, A, with no B present (and optionally including elements other than B); in another embodiment, to at least one, optionally including more than one, B, with no A present (and optionally including elements other than A); in yet another embodiment, to at least one, optionally including more than one, A, and at least one, optionally including more than one, B (and optionally including other elements); etc.

[0275] The present invention further provides a kit for preventing, treating or delaying a cardiovascular disease or condition in a human, wherein the kit comprises one or more doses of pharmaceutical composition comprising an activatable proprotein disclosed herein used for preventing, treating or delaying a cardiovascular disease or condition, and instructions on how to use the pharmaceutical preparation or composition.

[0276] The present invention further provides a kit for preventing, treating or delaying a CNS-related disease or condition in a human, wherein the kit comprises one or more doses of pharmaceutical composition comprising an activatable proprotein disclosed herein used for preventing, treating or delaying a cardiovascular disease or condition, and instructions on how to use the pharmaceutical preparation or composition.

[0277] The present invention further provides a kit for preventing, treating or delaying heart failure with preserved ejection fraction in a human, wherein the kit comprises one or more doses of pharmaceutical composition comprising an activatable protein disclosed herein used for preventing, treating or delaying heart failure with preserved ejection fraction, and instructions on how to use the pharmaceutical preparation or composition.

[0278] The following examples are presented in order to more fully illustrate the preferred embodiments of the invention. They should in no way be construed, however, as limiting the broad scope of the invention.

### EXAMPLES

### Example 1: Engineering of Fc-IL-15-Linker-IL-15Rα Fusion Proteins

[0279] In order to reduce the toxicity of IL-15 related therapeutic drugs, Fc-IL-15-linker-IL-15Rα fusion proteins (hereon referred to as Fc-ILR fusion proteins) were generated as prodrugs (i.e.—activatable proprotein as described elsewhere herein). The prodrugs have very low activities. Full activities can be restored upon protease cleavage of the designed protease specific linker sequence within the prodrugs.

[0280] Plasmids coding for single chain IL-15-linker-IL-15Rα (ILR) with or without Fc fusion were constructed by standard gene synthesis, followed by sub-cloning into pTT5 expression vector. Schematics of illustrative Fc-ILR fusion protein formats are depicted in FIGS. 3E, 3F, 4A, and 4F.

[0281] Illustrative proteins of Fc-ILR format without protease cleavage site include P1187 (SEQ ID NO: 18), P1188 (SEQ ID NO: 19), P1250 (SEQ ID NO: 20), P1251 (SEQ ID NO: 21), and P1252 (SEQ ID NO: 22).

[0282] Illustrative proteins of IL-15-linker-IL-15Rα-Fc (ILR-Fc) format (FIG. 3B) are P1186 (SEQ ID NO: 17) and P1331 (SEQ ID NO: 73).

[0283] Illustrative proteins of IL-15-linker-IL-15Rα format (FIGS. 2C and 2D) with His6-tag at the C-terminal of IL-15Rα are P1185 (SEQ ID NO: 16) and P1275 (SEQ ID NO: 39).

[0284] Illustrative proteins of ILR-Fc-a format (FIG. 3B) are P1332 (SEQ ID NO: 74) and P1333 (SEQ ID NO: 75).

[0285] C-terminal serine (S162) of IL-15 in IL15 fusion proteins is a potential glycosylation site in IL-15 fusion protein and glycosylation of S162 may affect the potency of the fusion proteins. A point mutation was introduced by standard mutagenesis techniques into IL-15-linker-IL-15Rα-Fc (ILR-Fc), Fc- IL-15-linker-IL-15Rα (Fc-ILR) and IL-15-linker-IL-15Rα (ILR). An illustrative protein of ILR-Fc with S162A is P1253 (SEQ ID NO: 23). Illustrative proteins of Fc-ILR with S162A are P1254 (SEQ ID NO: 24), P1255 (SEQ ID NO: 25), P1279 (SEQ ID NO: 41) and P1280 (SEQ ID NO: 42). Illustrative proteins of ILR-His6 with S162A are P1274 (SEQ ID NO: 38) and P1276 (SEQ ID NO: 40).

### Production, Purification and Characterization

[0286] Fc fusion proteins were produced by transient transfection in Expi293 cells and purified by a two-step purification process comprising MabSelect SuRe chromatography (GE Healthcare) and size exclusion chromatography (Superdex 200, GE Healthcare).

[0287] His-tagged protein were produced by transient transfection in Expi293 cells and purified by a two-step purification process comprising nickel affinity chromatography (GE Healthcare) and size exclusion chromatography (Superdex 75 or Superdex 200, GE Healthcare).

[0288] Purified proteins were characterized by SDS-PAGE and high performance liquid chromatography (HPLC) for purity and homogeneity assessment. HPLC analysis was performed using Nanofilm SEC-250 column (Sepax) and Agilent 1260 according to the manufacturer's instructions. Representative SDS-PAGE and HPLC results were shown in FIGS. 9A-9F and FIGS. 10A-10G. Purified protein showed good purity and homogeneity. For ILR-His format, P1274 (SEQ ID NO: 38) with 15 amino acid linker and P1276 (SEQ ID NO: 40) with 26 amino acid linker, the theoretic MW of monomer is around 24KD and dimer is around 50KD. Based on the HPLC result shown in FIG. 10G, it seems that P1274 (SEQ ID NO: 38) existed as homodimer in solution, indicating interchain IL-15/IL-15Rα complex formation, and P1276 (SEQ ID NO: 40) existed as monomer, indicating intrachain IL-15/IL-15Rα complex formation.

### Functional Assays—Cell Signaling

[0289] The proteins were then tested in in vitro functional assays. In cell signaling assay (phospho-STAT5) using PBMC, purified fusion proteins (with or without Fc) were incubated with PBMCs at 37° C. for 15 minutes. Following incubation, cellular stimulation was terminated by the addition of a fixation buffer to fix the cells for cellular staining. Cells were subsequently permeabilized by the addition of a permeabilization buffer (BD Perm III buffer, Cat #558050) following manufacturer protocols. PBMCs were then stained with anti-CD3-FITC (UCHT1, BD, Cat #555916) and a phospho-STAT5 antibody (pY694, Alexa647 conjugated, BD, Cat #612599). FIGS. 11A and 11B depict selection of cell population following incubation with P1185 (SEQ ID NO: 16). Lymphocytes were first gated on the basis of side scatter (SSC) and forward scatter (FSC) (FIG. 11A). Lymphocytes were then gated based on CD3 expression and STAT5 phosphorylation (FIG. 11B). The signaling assay results are summarized in FIG. 11C and FIG. 11D. ILR-His (P1185 with SEQ ID NO: 16, P1275 with SEQ ID NO: 39, P1274 with SEQ ID NO: 38 and P1276 with SEQ ID NO: 40) and ILR-Fc (P1186 with SEQ ID NO: 17, P1331 with SEQ ID NO: 73, P1253 with SEQ ID NO: 23, P1332 with SEQ ID NO: 74 and P1333 with SEQ ID NO: 75) showed cell signaling activity (phospho-STAT5) while Fc-ILR (P1187 with SEQ ID NO: 18, P1188 with SEQ ID NO: 19, P1250 with SEQ ID NO: 20, P1251 with SEQ ID NO: 21, P1252 with SEQ ID NO: 22, P1254 with SEQ ID NO: 24, P1255 with SEQ ID NO: 25, P1279 with SEQ ID NO: 41 and P1280 with SEQ ID NO: 42) are not active at stimulating STAT5 phosphorylation.

[0290] Cell signaling assay was also performed using human whole blood for a few purified fusion proteins. Human whole blood samples were collected from healthy individuals and used following the guidelines according to signed consent agreement. Purified fusion proteins were incubated with fresh human whole blood at 37° C. for 15 minutes. Following incubation, cellular stimulation was terminated by the addition of a lysis and fixation buffer (BD, Cat #558049) to remove red blood cells and fix the remaining cells for cellular staining. Anti-CD3-FITC (UCHT1, BD, Cat #555916) was added to the cell suspensions and incubated for 1 h at 37° C. for staining before being removed by two washing steps using phosphate buffered saline (PBS). Cells were subsequently permeabilized by the addition of a permeabilization buffer (BD Perm III buffer, Cat #558050) following manufacturer protocols and stained for 1 h using a phospho-STAT5 antibody (pY694, Alexa647 conjugated, BD, Cat #612599). The results are summarized in FIGS. 12A-12F and are consistent with cell signaling assay results using PBMC. ILR-His (P1274 with SEQ ID NO: 38) stimulated the proliferation of PBMCs compared to the control group while Fc-ILR (P1254 with SEQ ID NO: 24) did not do so.

### Functional Assays—Proliferation

[0291] Purified proteins were also tested in proliferation assay. M-07e (IL-2R□/□c) cells were cultured in RPMI 1640 supplemented with 20% fetal bovine serum (FBS), 1% non-essential amino acids (NEAA) and 10% of 5637 cell culture supernatant. To measure cytokine-dependent cell proliferation, M-07e cells were harvested in their logarithmic growth phase and washed twice with PBS. 90 μl of cell suspension (2×10⁴ cells/well) was seeded into 96-well plate and incubated for 4 hours in assay medium (RPMI 1640 supplemented with 10% FBS and 1% NEAA) for cytokine starvation at 37° C. and 5% C02. IL-15 and purified proteins samples used in assays were prepared in assay medium to an initial concentration of 300 nM, followed by ⅓ serial dilutions. 10 μl diluted protein was added into corresponding wells and incubated at 37° C. and 5% C02 for 72 hours. Colorimetric assays using a Cell Counting Kit-8 (CCK-8, Dojindo, CK04) were performed to measure the amount of live cells and the results are shown in FIGS. 13A and 13C. For ILR-Fc format (FIG. 13B), P1186 (SEQ ID NO 17), P1331 (SEQ ID NO: 73) and P1333 (SEQ ID NO: 75) showed 3-4 fold lower activity compared with P1185 (SEQ ID NO: 16).

[0292] Constructs with S162A mutation were compared with the corresponding constructs with S162 for potency (FIGS. 13D-13H). For Fc-ILR format (P1254 with SEQ ID NO: 24 and P1255 with SEQ ID NO: 25), activity was not improved with S162A mutation (FIGS. 13F-13G). For ILR-Fc (P1253 with SEQ ID NO: 23) and ILR-His with 15 amino acid linker between IL-15 and IL-15Rα (P1274 with SEQ ID NO: 38) with S162A mutation, potency of the fusion protein was improved by 5-7 fold (FIGS. 13D-13E). For ILR-His with 26 amino acid linker between IL-15 and IL-15Rα (P1276 with SEQ ID NO: 40), potency was not improved with S162A mutation (FIG. 13H), it seems that the linker between IL-15 and IL15-Ra may interfere with receptor P7 binding to IL-15 due to intrachain LR dimer formation.

[0293] Proliferation assay was also performed using human peripheral blood mononuclear cells (PBMCs) for a few purified fusion proteins. Human PBMCs were prepared by Ficoll centrifugation and stained with 5-(6)-carboxy-fluorescein succinimidyl ester (CFSE, Thermofisher, Cat #C34554) according to the manufacturer's instructions. Stained human PBMCs were seeded into 96-well plate (5×10⁴ cells per well) and incubated with purified fusion proteins at 37° C. and 5% C02 for 5-6 days. Human PBMC proliferation was assessed by flow cytometry and the results are summarized in FIGS. 14A-14F. Human PBMC proliferation results were consistent with other functional assay results, ILR-His (P1185 with SEQ ID NO: 16) and ILR-Fc (P1253 with SEQ ID NO: 23) could stimulate the proliferation of PBMCs.

### Example 2: Engineering of Fc-IL-15-Linker-IL-15Rα Fusion Proteins with Protease Cleavage Site in the Linker Between Fc and IL-15

[0294] In order to restore the activity of IL-15, TEV protease cleavage site was used to prove the concept and introduced into the linker between Fc and IL-15 of Fc-ILR constructs.

[0295] Plasmids coding for Fc-TEV-ILR were constructed by standard gene synthesis and sub-cloned into pTT5 expression vector with different lengths of linker flanking TEV cleavage site. Cartoon schematics of illustrative Fc-TEV-ILR fusion protein format are depicted in FIG. 6. Illustrative proteins of Fc-TEV-ILR format include P1256 (SEQ ID NO: 26), P1261 (SEQ ID NO: 32), P1281 (SEQ ID NO: 43), P1282 (SEQ ID NO: 49), P1283 (SEQ ID NO: 55), P1284 (SEQ ID NO: 61) and P1285 (SEQ ID NO: 67).

[0296] To form tighter IL-15/IL-15Rα complex, a disulfide bond was introduced between IL-15 and IL-15Rα with L52C mutation on IL-15 and S40C mutation on IL-15Rα. Illustrative proteins of this format include P1378 (SEQ ID NO: 226) and P1379 (SEQ ID NO: 232).

[0297] For activatable prodrug design, real protease cleavage sites (PSs) were introduced into the linker between Fc and IL-15 of Fc-ILR constructs. Plasmids coding for Fc-PSs-ILR were constructed by standard gene synthesis and sub-cloned into pTT5 expression vector with linker flanking protease cleavage sites. Cartoon schematics of illustrative Fc-PSs-ILR fusion protein format are depicted in FIG. 6. Illustrative proteins of Fc-PSs-ILR format include P1334 (SEQ ID NO: 76), P1335 (SEQ ID NO: 87), P1336 (SEQ ID NO: 98), P1337 (SEQ ID NO: 114), P1338 (SEQ ID NO: 130), P1339 (SEQ ID NO: 146), P1340 (SEQ ID NO: 162), P1341 (SEQ ID NO: 178), P1342 (SEQ ID NO: 194), P1343 (SEQ ID NO: 210), P1380 (SEQ ID NO: 238), P1381 (SEQ ID NO: 254), P1382 (SEQ ID NO: 270), P1383 (SEQ ID NO: 286), P1423 (SEQ ID NO: 338), P1424 (SEQ ID NO: 339), P1425 (SEQ ID NO: 340), P1426 (SEQ ID NO: 341), P1427 (SEQ ID NO: 342) and P1428 (SEQ ID NO: 343).

[0298] Fc fusion proteins were produced, purified and characterized as described in Example 1.

[0299] Purified proteins with TEV cleavage site were tested by TEV cleavage (FIGS. 15A-15I). P1256 (SEQ ID NO: 26), with shortest linker flanking TEV cleavage site, could be partially cleaved by TEV at both 4° C. and 37° C. at TEV to protein ratio of 1 to 5 and 1:10. For proteins (P1261 with SEQ ID NO 32, P2181 with SEQ ID NO 43, P1282 with SEQ ID NO 49, P1283 with SEQ ID NO 55, P1284 with SEQ ID NO 61 and P1285 with SEQ ID NO 67) with longer linker flanking TEV cleavage site than P1256 (SEQ ID NO: 26), most of the target protein could be cleaved by TEV at both 4° C. and 37° C. at a TEV to protein ratio of 1 to 20. P1378 (SEQ ID NO 226) and P1379 (SEQ ID NO 232) could be partially cleaved by TEV at 4° C. at a TEV to protein ratio of 1 to 1. Uncleaved and TEV cleaved proteins were then tested in in vitro functional assays using the same method as described in Example 1. Cell signaling assay (phospho-STAT5) results are summarized in FIG. 17A and M-07e proliferation assay results are summarized in FIGS. 18A-18F. Based on functional assay results, IL-15 activity was restored after TEV cleavage between Fc and IL-15 on Fc-TEV-ILR fusion proteins while TEV treated P1187 (SEQ ID NO: 18) did not show function.

[0300] Purified Fc-PSs-ILR proteins were tested for protease cleavage assays by protease uPA (R&D, Cat #1310-SE-010), matriptase (R&D, Cat #3946-SEB-010), legumain (R&D, Cat #2199-CY-010), MMP-2 (R&D, Cat #902-MP-010) and MMP-9 (R&D, Cat #911-MP-010) respectively and the results are shown in FIGS. 16A-16G. The purified proteins could be cleaved completely or partially by the above proteases.

[0301] Uncleaved and protease cleaved proteins were then tested in in vitro functional assays using the same methods as described in Example 1. Cell signaling assay (phospho-STAT5) results are summarized in FIG. 17B, M-07e proliferation assay results are summarized in FIGS. 18G-18I and PBMC proliferation assay results are summarized in FIG. 19A-19D. IL-15 activity was restored after protease cleavage between Fc and IL-15.

### Example 3: Engineering of Fc-IL-15-Linker-IL-15Rα Fusion Proteins with Protease Cleavage Site in the Linker Between IL-15 and IL-15Rα

[0302] In order to restore the activity of IL-15, TEV protease cleavage site was used to prove the concept and introduced into the linker between IL-15 and IL-15Rα of Fc-ILR constructs.

[0303] Plasmids were constructed using the same method as described in Example 2. Cartoon schematics of illustrative Fc-ILR fusion protein format are depicted in FIG. 8.

[0304] Illustrative proteins of Fc-IL-15 (S162A)-TEV-IL-15Rα format include P1393 (SEQ ID NO: 302), P1394 (SEQ ID NO: 308) and P1395 (SEQ ID NO: 314).

[0305] Illustrative proteins of Fc-IL-15 (S162A, L52C)-TEV-IL-15Rα (S40C) format include P1396 (SEQ ID NO: 320), P1397 (SEQ ID NO: 326) and P1398 (SEQ ID NO: 332).

[0306] Fc fusion proteins were produced, purified and characterized as described in Example 1.

[0307] Purified proteins were tested by TEV cleavage at TEV to protein ratio of 1 to 1 and the results are shown in FIGS. 20A-20F. The results showed that all of the six proteins could be cleaved by TEV completely at TEV to protein ratio of 1 to 1 at 4° C.

[0308] Uncleaved and TEV cleaved proteins were then tested in in vitro functional assays using the same methods as described in Example 1. Cell signaling assay (phospho-STAT5) results are summarized in FIG. 21 and M-07e proliferation assay results are summarized in FIGS. 22A-22F. IL-15 activity was restored after protease cleavage of the linker sequence between IL-15 and IL-15Rα.

### Example 4: Optimization of Cleavable Linker Sequence

[0309] For activatable prodrug design, different protease cleavage sequences were introduced into the linker between Fc and IL-15 for Fc-IL-15-PS-IL-15Rα format. Plasmids coding for Fc-IL-15-PS-IL-15Rα were synthesized by standard gene synthesis and sub-cloned into pTT5 vector.

[0310] Illustrative proteins of Fc-PS-IL-15-stable linker-IL-15Rα include P1423, P1424, P1425, P1426, P1427, P1428, P1471, P1472, P1473, P1474, P1475, P1476, P1477, P1478, P1479, P1480, P1481, P1482, P1483, P1484, P1485, P1486, P1487, P1488, P1489, P1490, P1491, P1492, P1493, P1494, P1495, P1496, P1497, P1498, P1499, P1500, P1501, P1502, P1503, P1504, P1505, P1506, P1511, P1540, P1541, P1637, P1638, P1639, P1658 and P1659.

[0311] Illustrative proteins of Fc-PS-IL-15mut-stable linker-IL-15Rα include P1652, P1653, P1654, P1655, P1656 and P1657.

[0312] Illustrative proteins of Fc-PS-IL-15-stable linker-IL-15Rα with optimized codon for IL-15 and IL-15Rα include P1660, P1661 and P1663.

[0313] Illustrative proteins of Fc-PS-IL-15-stable linker-IL-15Rα with different stable linker length include P2162, P2163, P2164, P2165, P2166, P2167, P2168 and P2169.

[0314] Illustrative proteins of Fc-stable linker-IL-15-PS-IL-15Rα include P1542, P1636, P1696, P1697, P1698, P1699, P1700, P1701, P1702, P1703, P1704, P1705, P1706 and P1707.

[0315] Illustrative proteins of Fc-stable linker-IL-15-PS-IL-15Rα with disulfide bond between two IL-15Rα molecules include P1973, P1974 and P1975.

[0316] Illustrative proteins of Fc-PS-IL-15-stable linker-IL-15Rα-sushi include P1682 and P1683.

[0317] Fc fusion proteins were produced, purified and characterized as described in Example 1. Representative SDS-PAGE and HPLC results are summarized in FIGS. 23A-23F, FIGS. 24A-24F, and FIGS. 25A-25X. Purified proteins showed good purity based on the SDS-PAGE results. Most of the purified proteins showed good homogeneity based on the HPLC results. Dimer and/or polymer were observed for the fusion proteins with shorter linker between IL-15 and IL-15Rα, e.g. P2163, P2164, P2166 and P2167.

[0318] Purified proteins were tested for protease cleavage assays by protease uPA (R&D, Cat #1310-SE-010), matriptase (R&D, Cat #3946-SEB-010), legumain (R&D, Cat #2199-CY-010), MMP-2 (R&D, Cat #902-MP-010), MMP-9 (R&D, Cat #911-MP-010), KLK5 (R&D, Cat #1108-SE) or/and KLK7 (R&D, Cat #2624-SE) respectively and representative results are shown in FIGS. 26A-26P.

[0319] Uncleaved and protease cleaved proteins were then tested in M-07e proliferation assay using the same method as described in Example 1. The results are summarized in FIGS. 27A-27N and FIGS. 28A-28W.

[0320] Protein in vitro serum stability was tested in serum from human, cyno, mouse and rat. Equivalent amounts of protein were incubated with fresh serum at 37° C. for different times. Protein was run on 12% SDS-PAGE gel and transferred to nitrocellulose membrane. Membranes were blocked with non-fat dry milk or BSA in TBST, probed with biotinylated anti-IL-15 antibody (R&D, Cat #BAF247), and subsequently probed with streptavidin-HRP. Alternatively, membranes were probed with HRP-anti-human IgG antibody. Representative western blot results are shown in FIGS. 29A-29F.

### Example 5: Engineering of Anti-FAP-IL-15 Prodrug

[0321] IL-15 prodrug was fused onto the C-terminal of anti-FAP antibody with protease cleavable sequence between Fc and IL-15 or/and with cleavable protease sequence between IL-15 and IL-15Rα. Plasmids coding anti-FAP-IL-15 prodrug was synthesized by standard gene synthesis and sub-cloned into pTT5 vector.

[0322] Illustrative proteins with protease cleavage site between Fc and IL-15 include P15431450 and P16401450.

[0323] Illustrative proteins with protease cleavage site between IL-15 and IL-15Rα include P18121450, P18131453, P18141563, P18151450, P18161453, P18171563, P19681450 and P19691450.

[0324] Illustrative proteins with protease cleavage site between Fc and IL-15 and with protease cleavage site between IL-15 and IL-15Rα include P24872158, P24882158, P24892158, P24902158, P24912158, P25162158 and P25172158.

[0325] Anti-FAP-IL-15 fusion proteins were produced, purified and characterized as described in Example 1. Representative SDS-PAGE and HPLC results were summarized in FIGS. 30A-30B and FIGS. 31A-31F. Purified proteins showed good purity based on the SDS-PAGE results. Most of the purified proteins showed good homogeneity based on the HPLC results.

[0326] Purified proteins were tested for protease cleavage assays by protease uPA (R&D, Cat #1310-SE-010), matriptase (R&D, Cat #3946-SEB-010), legumain (R&D, Cat #2199-CY-010), MMP-2 (R&D, Cat #902-MP-010), MMP-9 (R&D, Cat #911-MP-010), KLK5 (R&D, Cat #1108-SE) or/and KLK7 (R&D, Cat #2624-SE) respectively and the results are shown in FIG. 32.

[0327] Uncleaved and protease cleaved proteins were then tested in M-07e proliferation assay using the same method as described in Example 1. The results are summarized in FIGS. 33A-33J.

[0328] Protein in vitro serum stability was tested in serum from human, cyno, mouse and rat, as described in Example 4. Representative results are shown in FIGS. 34A-34B.

### EXEMPLARY SEQUENCES

Human IL-15 precursor sequence
>human_IL-15_LSP (P40933)
(SEQ ID NO: 1)
MRISKPHLRSISIQCYLCLLLNSHFLTEAGIHVFILGCFSAGLPKTEANWVNVISDLKKIEDLIQSMHIDATLYT
ESDVHPSCKVTAMKCFLLELQVISLESGDASIHDTVENLIILANNSLSSNGNVTESGCKECEELEEKNIKEFLQS
FVHIVQMFINTS
Human IL-15 mature form sequence
>P40933 (N49-S162) (L)
(SEQ ID NO: 2)
NWVNVISDLKKIEDLIQSMHIDATLYTESDVHPSCKVTAMKCFLLELQVISLESGDASIHDTVENLIILANNSLS
SNGNVTESGCKECEELEEKNIKEFLQSFVHIVQMFINTS
Human IL-15 mature form sequence with point mutation of S162A
>IL-15_v1 (49-162 with S162A) (L)
(SEQ ID NO: 3)
NWVNVISDLKKIEDLIQSMHIDATLYTESDVHPSCKVTAMKCFLLELQVISLESGDASIHDTVENLIILANNSLS
SNGNVTESGCKECEELEEKNIKEFLQSFVHIVQMFINTA
Human IL-15Rα full length sequence
>human_IL-15Rα_FL (Q13261)
(SEQ ID NO: 4)
MAPRRARGCRTLGLPALLLLLLLRPPATRGITCPPPMSVEHADIWVKSYSLYSRERYICNSGFKRKAGTSSLTEC
VLNKATNVAHWTTPSLKCIRDPALVHQRPAPPSTVTTAGVTPQPESLSPSGKEPAASSPSSNNTAATTAAIVPGS
QLMPSKSPSTGTTEISSHESSHGTPSQTTAKNWELTASASHQPPGVYPQGHSDTTVAISTSTVLLCGLSAVSLLA
CYLKSRQTPPLASVEMEAMEALPVTWGTSSRDEDLENCSHHL
Human IL-15Rα extracellular domain
>human_IL-15Rα-ECD
(SEQ ID NO: 5)
ITCPPPMSVEHADIWVKSYSLYSRERYICNSGFKRKAGTSSLTECVLNKATNVAHWTTPSLKCIRDPALVHQRPA
PPSTVTTAGVTPQPESLSPSGKEPAASSPSSNNTAATTAAIVPGSQLMPSKSPSTGTTEISSHESSHGTPSQTTA
KNWELTASASHQPPGVYPQGHSDTT
Human IL-15Rα, sushi+
>Q13261 31-108 (R)
(SEQ ID NO: 6)
ITCPPPMSVEHADIWVKSYSLYSRERYICNSGFKRKAGTSSLTECVLNKATNVAHWTTPSLKCIRDPALVHQRPA
PPS
Human IL-15Rα, sushi
>human_IL-15Rα-sushi
(SEQ ID NO: 7)
ITCPPPMSVEHADIWVKSYSLYSRERYICNSGFKRKAGTSSLTECVLNKATNVAHWTTPSLKCIR
Fc-IL-15-IL-15Rα backbone 1
>Human IgG1 Fc
(SEQ ID NO: 8)
EPKSSDKTHTCPPCPAPELLGGPSVFLFPPKPKDTLMISRTPEVTCVVVDVSHEDPEVKFNWYVDGVEVHNAKTK
PREEQYNSTYRVVSVLTVLHQDWLNGKEYKCKVSNKALPAPIEKTISKAKGQPREPQVYTLPPSREEMTKNQVSL
TCLVKGFYPSDIAVEWESNGQPENNYKTTPPVLDSDGSFFLYSKLTVDKSRWQQGNVFSCSVMHEALHNHYTQKS
LSLSPGK
Fc-IL-15-IL-15Rα backbone 2
>Human IgG1 Fc-a
(SEQ ID NO: 9)
KTHTCPPCPAPELLGGPSVFLFPPKPKDTLMISRTPEVTCVVVDVSHEDPEVKFNWYVDGVEVHNAKTKPREEQY
NSTYRVVSVLTVLHQDWLNGKEYKCKVSNKALPAPIEKTISKAKGQPREPQVYTLPPSREEMTKNQVSLTCLVKG
FYPSDIAVEWESNGQPENNYKTTPPVLDSDGSFFLYSKLTVDKSRWQQGNVFSCSVMHEALHNHYTQKSLSLSPG
K
Fc-IL-15-IL-15Rα backbone 3
>Human IgG1 Fc-b_L234A/L235A/P329A/M252Y/S254T/T256E
(SEQ ID NO: 10)
EPKSSDKTHTCPPCPAPEAAGGPSVFLFPPKPKDTLYITREPEVTCVVVDVSHEDPEVKFNWYVDGVEVHNAKTK
PREEQYNSTYRVVSVLTVLHQDWLNGKEYKCKVSNKALAAPIEKTISKAKGQPREPQVYTLPPSREEMTKNQVSL
TCLVKGFYPSDIAVEWESNGQPENNYKTTPPVLDSDGSFFLYSKLTVDKSRWQQGNVFSCSVMHEALHNHYTQKS
LSLSPGK
Fc-IL-15-IL-15Rα backbone 4
>Human IgG1 Fc-c
(SEQ ID NO: 11)
EPKSSDKTHTCPPCPAPELLGGPSVFLFPPKPKDTLMISRTPEVTCVVVDVSHEDPEVKFNWYVDGVEVHNAKTK
PREEQYNSTYRVVSVLTVLHQDWLNGKEYKCKVSNKALPAPIEKTISKAKGQPREPQVYTLPPSREEMTKNQVSL
TCLVKGFYPSDIAVEWESNGQPENNYKTTPPVLDSDGSFFLYSKLTVDKSRWQQGNVFSCSVMHEALHNHYTQKS
LSLSPGK
IL-15-(GGS)5-IL-15Rα
>L15R
(SEQ ID NO: 12)
NWVNVISDLKKIEDLIQSMHIDATLYTESDVHPSCKVTAMKCFLLELQVISLESGDASIHDTVENLIILANNSLS
SNGNVTESGCKECEELEEKNIKEFLQSFVHIVQMFINTSGGSGGSGGSGGSGGSITCPPPMSVEHADIWVKSYSL
YSRERYICNSGFKRKAGTSSLTECVLNKATNVAHWTTPSLKCIRDPALVHQRPAPPS
IL-15 (L52C)-(GGS)5-IL-15Rα (S40C)
>L15R_(L:L52C)_(R:S40C)
(SEQ ID NO: 13)
NWVNVISDLKKIEDLIQSMHIDATLYTESDVHPSCKVTAMKCFLLELQVISCESGDASIHDTVENLIILANNSLS
SNGNVTESGCKECEELEEKNIKEFLQSFVHIVQMFINTSGGSGGSGGSGGSGGSITCPPPMSVEHADIWVKSYSL
YSRERYICNSGFKRKAGTCSLTECVLNKATNVAHWTTPSLKCIRDPALVHQRPAPPS
IL-15-(GGS)2-EPKSSDKTHT-(GGS)2-IL-15Rα
>L22R
(SEQ ID NO: 14)
NWVNVISDLKKIEDLIQSMHIDATLYTESDVHPSCKVTAMKCFLLELQVISLESGDASIHDTVENLIILANNSLS
SNGNVTESGCKECEELEEKNIKEFLQSFVHIVQMFINTSGGSGGSEPKSSDKTHTGGSGGSITCPPPMSVEHADI
WVKSYSLYSRERYICNSGFKRKAGTSSLTECVLNKATNVAHWTTPSLKCIRDPALVHQRPAPPS
IL-15-(GGS)2-EPKSSDKTHT-(GGS)2GGGS-IL-15Rα
>L26R
(SEQ ID NO: 15)
NWVNVISDLKKIEDLIQSMHIDATLYTESDVHPSCKVTAMKCFLLELQVISLESGDASIHDTVENLIILANNSLS
SNGNVTESGCKECEELEEKNIKEFLQSFVHIVQMFINTS [symbol] [symbol] ITCPPPMSVE
HADIWVKSYSLYSRERYICNSGFKRKAGTSSLTECVLNKATNVAHWTTPSLKCIRDPALVHQRPAPPS
IL-15-(GGS)5-IL-15Rα-G4S-HHHHHH homodimer
>P1185_L15R-G4S-his6_chains 1 and 2
(SEQ ID NO: 16)
NWVNVISDLKKIEDLIQSMHIDATLYTESDVHPSCKVTAMKCFLLELQVISLESGDASIHDTVENLIILANNSLS
SNGNVTESGCKECEELEEKNIKEFLQSFVHIVQMFINTS [symbol] [symbol] ITCPPPMSVEHADIWVKSYSL
YSRERYICNSGFKRKAGTSSLTECVLNKATNVAHWTTPSLKCIRDPALVHQRPAPPSGGGGSHHHHHH
IL-15-(GGS)5-IL-15Rα-G4S-Fc homodimer
>P1186_L15R-stable-Fc_chains 1 and 2
(SEQ ID NO: 17)
NWVNVISDLKKIEDLIQSMHIDATLYTESDVHPSCKVTAMKCFLLELQVISLESGDASIHDTVENLIILANNSLS
SNGNVTESGCKECEELEEKNIKEFLQSFVHIVQMFINTS [symbol] ITCPPPMSVEHADIWVKSYSL
YSRERYICNSGFKRKAGTSSLTECVLNKATNVAHWTTPSLKCIRDPALVHQRPAPPS [symbol] EPKSSDKTHTCPP
CPAPELLGGPSVFLFPPKPKDTLMISRTPEVTCVVVDVSHEDPEVKFNWYVDGVEVHNAKTKPREEQYNSTYRVV
SVLTVLHQDWLNGKEYKCKVSNKALPAPIEKTISKAKGQPREPQVYTLPPSREEMTKNQVSLTCLVKGFYPSDIA
VEWESNGQPENNYKTTPPVLDSDGSFFLYSKLTVDKSRWQQGNVFSCSVMHEALHNHYTQKSLSLSPGK
Fc-GGGSKTHTGGGS-IL-15-(GGS)5-IL-15Rα homodimer
>P1187_Fc-stableS-L15R_chains 1 and 2
(SEQ ID NO: 18)
EPKSSDKTHTCPPCPAPELLGGPSVFLFPPKPKDTLMISRTPEVTCVVVDVSHEDPEVKFNWYVDGVEVHNAKTK
PREEQYNSTYRVVSVLTVLHQDWLNGKEYKCKVSNKALPAPIEKTISKAKGQPREPQVYTLPPSREEMTKNQVSL
TCLVKGFYPSDIAVEWESNGQPENNYKTTPPVLDSDGSFFLYSKLTVDKSRWQQGNVFSCSVMHEALHNHYTQKS
LSLSPGK [symbol] [symbol] NWVNVISDLKKIEDLIQSMHIDATLYTESDVHPSCKVTAMKCFLLELQVISLESGD
ASIHDTVENLIILANNSLSSNGNVTESGCKECEELEEKNIKEFLQSFVHIVQMFINTS [symbol] IT
CPPPMSVEHADIWVKSYSLYSRERYICNSGFKRKAGTSSLTECVLNKATNVAHWTTPSLKCIRDPALVHQRPAPP
S
Fc-GGGSKTHTGGGS-IL-15-(GGS)2-EPKSSDKTHT-(GGS)2-IL-15Rα homodimer
>P1188_Fc-stable-L22R_chains 1 and 2
(SEQ ID NO: 19)
EPKSSDKTHTCPPCPAPELLGGPSVFLFPPKPKDTLMISRTPEVTCVVVDVSHEDPEVKFNWYVDGVEVHNAKTK
PREEQYNSTYRVVSVLTVLHQDWLNGKEYKCKVSNKALPAPIEKTISKAKGQPREPQVYTLPPSREEMTKNQVSL
TCLVKGFYPSDIAVEWESNGQPENNYKTTPPVLDSDGSFFLYSKLTVDKSRWQQGNVFSCSVMHEALHNHYTQKS
LSLSPGK [symbol] NWVNVISDLKKIEDLIQSMHIDATLYTESDVHPSCKVTAMKCFLLELQVISLESGD
ASIHDTVENLIILANNSLSSNGNVTESGCKECEELEEKNIKEFLQSFVHIVQMFINTS [symbol] [symbol] [symbol]
ITCPPPMSVEHADIWVKSYSLYSRERYICNSGFKRKAGTSSLTECVLNKATNVAHWTTPSLKCIRDPALV
HQRPAPPS
Fc-GGGS-IL-15-(GGS)5-IL-15Rα homodimer
>P1250_Fc-4-L15R_chains 1 and 2
(SEQ ID NO: 20)
EPKSSDKTHTCPPCPAPELLGGPSVFLFPPKPKDTLMISRTPEVTCVVVDVSHEDPEVKFNWYVDGVEVHNAKTK
PREEQYNSTYRVVSVLTVLHQDWLNGKEYKCKVSNKALPAPIEKTISKAKGQPREPQVYTLPPSREEMTKNQVSL
TCLVKGFYPSDIAVEWESNGQPENNYKTTPPVLDSDGSFFLYSKLTVDKSRWQQGNVFSCSVMHEALHNHYTQKS
LSLSPGK [symbol] NWVNVISDLKKIEDLIQSMHIDATLYTESDVHPSCKVTAMKCFLLELQVISLESGDASIHDTVE
NLIILANNSLSSNGNVTESGCKECEELEEKNIKEFLQSFVHIVQMFINTS [symbol] [symbol] ITCPPPMSVE
HADIWVKSYSLYSRERYICNSGFKRKAGTSSLTECVLNKATNVAHWTTPSLKCIRDPALVHQRPAPPS
Fc-GGGS-IL-15-(GGS)2-EPKSSDKTHT-(GGS)2-IL-15Rα homodimer
>P1251_Fc-4-L22R_chains 1 and 2
(SEQ ID NO: 21)
EPKSSDKTHTCPPCPAPELLGGPSVFLFPPKPKDTLMISRTPEVTCVVVDVSHEDPEVKFNWYVDGVEVHNAKTK
PREEQYNSTYRVVSVLTVLHQDWLNGKEYKCKVSNKALPAPIEKTISKAKGQPREPQVYTLPPSREEMTKNQVSL
TCLVKGFYPSDIAVEWESNGQPENNYKTTPPVLDSDGSFFLYSKLTVDKSRWQQGNVFSCSVMHEALHNHYTQKS
LSLSPGK [symbol] NWVNVISDLKKIEDLIQSMHIDATLYTESDVHPSCKVTAMKCFLLELQVISLESGDASIHDTVE
NLIILANNSLSSNGNVTESGCKECEELEEKNIKEFLQSFVHIVQMFINTS [symbol] [symbol] ITC
PPPMSVEHADIWVKSYSLYSRERYICNSGFKRKAGTSSLTECVLNKATNVAHWTTPSLKCIRDPALVHQRPAPPS
Fc-GGGSKTHTGGGS-IL-15-(GGS)2-EPKSSDKTHT-(GGS)2-GGGS-IL-15Rα homodimer
>P1252_Fc-stable-L26R_chains 1 and 2
(SEQ ID NO: 22)
EPKSSDKTHTCPPCPAPELLGGPSVFLFPPKPKDTLMISRTPEVTCVVVDVSHEDPEVKFNWYVDGVEVHNAKTK
PREEQYNSTYRVVSVLTVLHQDWLNGKEYKCKVSNKALPAPIEKTISKAKGQPREPQVYTLPPSREEMTKNQVSL
TCLVKGFYPSDIAVEWESNGQPENNYKTTPPVLDSDGSFFLYSKLTVDKSRWQQGNVFSCSVMHEALHNHYTQKS
LSLSPGK [symbol] [symbol] NWVNVISDLKKIEDLIQSMHIDATLYTESDVHPSCKVTAMKCFLLELQVISLESGD
ASIHDTVENLIILANNSLSSNGNVTESGCKECEELEEKNIKEFLQSFVHIVQMFINTS [symbol] [symbol] [symbol]
ITCPPPMSVEHADIWVKSYSLYSRERYICNSGFKRKAGTSSLTECVLNKATNVAHWTTPSLKCIRD
PALVHQRPAPPS
IL-15 (S162A)-(GGS)5-IL-15Rα-GGGGS-Fc homodimer
>P1253_L15R(IL15-S162A)-stable-Fc)_chains 1 and 2
(SEQ ID NO: 23)
NWVNVISDLKKIEDLIQSMHIDATLYTESDVHPSCKVTAMKCFLLELQVISLESGDASIHDTVENLIILANNSLS
SNGNVTESGCKECEELEEKNIKEFLQSFVHIVQMFINT [symbol] [symbol] ITCPPPMSVEHADIWVKSYSL
YSRERYICNSGFKRKAGTSSLTECVLNKATNVAHWTTPSLKCIRDPALVHQRPAPPS [symbol] EPKSSDKTHTCPP
CPAPELLGGPSVFLFPPKPKDTLMISRTPEVTCVVVDVSHEDPEVKFNWYVDGVEVHNAKTKPREEQYNSTYRVV
SVLTVLHQDWLNGKEYKCKVSNKALPAPIEKTISKAKGQPREPQVYTLPPSREEMTKNQVSLTCLVKGFYPSDIA
VEWESNGQPENNYKTTPPVLDSDGSFFLYSKLTVDKSRWQQGNVFSCSVMHEALHNHYTQKSLSLSPGK
Fc-GGGSKTHTGGGS-IL-15 (S162A)-(GGS)5-IL-15Rα homodimer
>P1254_Fc-stableS-L15R(IL15-S162A)_chains 1 and 2
(SEQ ID NO: 24)
EPKSSDKTHTCPPCPAPELLGGPSVFLFPPKPKDTLMISRTPEVTCVVVDVSHEDPEVKFNWYVDGVEVHNAKTK
PREEQYNSTYRVVSVLTVLHQDWLNGKEYKCKVSNKALPAPIEKTISKAKGQPREPQVYTLPPSREEMTKNQVSL
TCLVKGFYPSDIAVEWESNGQPENNYKTTPPVLDSDGSFFLYSKLTVDKSRWQQGNVFSCSVMHEALHNHYTQKS
LSLSPGK [symbol] [symbol] NWVNVISDLKKIEDLIQSMHIDATLYTESDVHPSCKVTAMKCFLLELQVISLESGD
ASIHDTVENLIILANNSLSSNGNVTESGCKECEELEEKNIKEFLQSFVHIVQMFINTA [symbol] IT
CPPPMSVEHADIWVKSYSLYSRERYICNSGFKRKAGTSSLTECVLNKATNVAHWTTPSLKCIRDPALVHQRPAPP
S
Fc-GGGSKTHTGGGS-IL-15 (S162A)-(GGS)2-EPKSSDKTHT-(GGS)2-IL15Rα homodimer
>P1255_Fc-stable-L22R(IL15-S162A)_chains 1 and 2
(SEQ ID NO: 25)
EPKSSDKTHTCPPCPAPELLGGPSVFLFPPKPKDTLMISRTPEVTCVVVDVSHEDPEVKFNWYVDGVEVHNAKTK
PREEQYNSTYRVVSVLTVLHQDWLNGKEYKCKVSNKALPAPIEKTISKAKGQPREPQVYTLPPSREEMTKNQVSL
TCLVKGFYPSDIAVEWESNGQPENNYKTTPPVLDSDGSFFLYSKLTVDKSRWQQGNVFSCSVMHEALHNHYTQKS
LSLSPGK [symbol] [symbol] NWVNVISDLKKIEDLIQSMHIDATLYTESDVHPSCKVTAMKCFLLELQVISLESGD
ASIHDTVENLIILANNSLSSNGNVTESGCKECEELEEKNIKEFLQSFVHIVQMFINT [symbol] [symbol] [symbol]
ITCPPPMSVEHADIWVKSYSLYSRERYICNSGFKRKAGTSSLTECVLNKATNVAHWTTPSLKCIRDPALV
HQRPAPPS
Fc-GS-ENLYFQG-GS-IL-15-(GGS)5-IL-15Rα homodimer
>P1256_Fc-TEV-L15R_chains 1 and 2
Chains 1 and 2
(SEQ ID NO: 26)
EPKSSDKTHTCPPCPAPELLGGPSVFLFPPKPKDTLMISRTPEVTCVVVDVSHEDPEVKFNWYVDGVEVHNAKTK
PREEQYNSTYRVVSVLTVLHQDWLNGKEYKCKVSNKALPAPIEKTISKAKGQPREPQVYTLPPSREEMTKNQVSL
TCLVKGFYPSDIAVEWESNGQPENNYKTTPPVLDSDGSFFLYSKLTVDKSRWQQGNVFSCSVMHEALHNHYTQKS
LSLSPGK [symbol] [symbol] NWVNVISDLKKIEDLIQSMHIDATLYTESDVHPSCKVTAMKCFLLELQVISLESGDA
SIHDTVENLIILANNSLSSNGNVTESGCKECEELEEKNIKEFLQSFVHIVQMFINTS [symbol] [symbol] ITC
PPPMSVEHADIWVKSYSLYSRERYICNSGFKRKAGTSSLTECVLNKATNVAHWTTPSLKCIRDPALVHQRPAPPS

[0330] Expected Cleaved Products from TEV Cleavage of P1256

1) Fc-GSENLYFQ homodimer (product from complete
cleavage)
Chains 1 and 2
(SEQ ID NO: 27)
EPKSSDKTHTCPPCPAPELLGGPSVFLFPPKPKDTLMISRTPEVTC
VVVDVSHEDPEVKFNWYVDGVEVHNAKTKPREEQYNSTYRVVSVLI
VLHQDWLNGKEYKCKVSNKALPAPIEKTISKAKGQPREPQVYTLPP
SREEMTKNQVSLICLVKGFYPSDIAVEWESNGQPENNYKTTPPVLD
SDGSFFLYSKLTVDKSRWQQGNVFSCSVMHEALHNHYTQKSLSLSP
GK [symbol]
2) GGS-IL-15-(GGS)5-IL-15Rα homodimer(product
from complete cleavage, active)
Chains 1 and 2
(SEQ ID NO: 28) [symbol]
NWVNVISDLKKIEDLIQSMHIDATLYTESDVHPSCKVTAMKCF
LLELQVISLESGDASIHDTVENLIILANNSLSSNGNVTESGCKECE
ELEEKNIKEFLQSFVHIVQMFINTS [symbol] [symbol] ITCPPP
MSVEHADIWVKSYSLYSRERYICNSGFKRKAGTSSLTECVLNKATN
VAHWTTPSLKCIRDPALVHQRPAPPS
3) Fc-GS-ENLYFQG-GS-IL-15-(GGS)5-IL-15Rα/Fc-
GSENLYFQ/GGS-IL-15-(GGS)5-IL-15Rα (product
from partial cleavage, active)
Chain 1: Fc-GS-ENLYFQG-GS-IL-15-(GGS)5-IL-15Rα
(SEQ ID NO: 29)
EPKSSDKTHTCPPCPAPELLGGPSVFLFPPKPKDTLMISRTPEVTC
VVVDVSHEDPEVKFNWYVDGVEVHNAKTKPREEQYNSTYRVVSVLT
VLHQDWLNGKEYKCKVSNKALPAPIEKTISKAKGQPREPQVYTLPP
SREEMTKNQVSLTCLVKGFYPSDIAVEWESNGQPENNYKTTPPVLD
SDGSFFLYSKLTVDKSRWQQGNVFSCSVMHEALHNHYTQKSLSLSP
GK [symbol] [symbol] NWVNVISDLKKIEDLIQSMHIDATLYTESDVHP
SCKVTAMKCFLLELQVISLESGDASIHDTVENLIILANNSLSSNGN
VTESGCKECEELEEKNIKEFLQSFVHIVQMFINTS [symbol] [symbol]
ITCPPPMSVEHADIWVKSYSLYSRERYICNSGFKRKA
GTSSLTECVLNKATNVAHWTTPSLKCIRDPALVHQRPAPPS
Chain 2: Fc-GSENLYFQ
(SEQ ID NO: 30)
EPKSSDKTHTCPPCPAPELLGGPSVFLFPPKPKDTLMISRTPEVTC
VVVDVSHEDPEVKFNWYVDGVEVHNAKTKPREEQYNSTYRVVSVLT
VLHQDWLNGKEYKCKVSNKALPAPIEKTISKAKGQPREPQVYTLPP
SREEMTKNQVSLTCLVKGFYPSDIAVEWESNGQPENNYKTTPPVLD
SDGSFFLYSKLTVDKSRWQQGNVFSCSVMHEALHNHYTQKSLSLSP
GK [symbol]
Chain 3: GGS-IL-15-(GGS)5-IL-15Rα
(SEQ ID NO: 31) [symbol]
NWVNVISDLKKIEDLIQSMHIDATLYTESDVHPSCKVTAMKCF
LLELQVISLESGDASIHDTVENLIILANNSLSSNGNVTESGCKECE
ELEEKNIKEFLQSFVHIVQMFINTS [symbol] [symbol] ITCPPP
MSVEHADIWVKSYSLYSRERYICNSGFKRKAGTSSLTECVLNKATN
VAHWTTPSLKCIRDPALVHQRPAPPS
Fc-GGGGSENLYFQGGGGGS-IL-15-(GGS)5-IL-15Rα
homodimer
>P1261_15LR-13_Fc-linker-TEV-linker-L15R
chains 1 and 2
(SEQ ID NO: 32)
EPKSSDKTHTCPPCPAPELLGGPSVFLFPPKPKDTLMISRTPEVTC
VVVDVSHEDPEVKFNWYVDGVEVHNAKTKPREEQYNSTYRVVSVLT
VLHQDWLNGKEYKCKVSNKALPAPIEKTISKAKGQPREPQVYTLPP
SREEMTKNQVSLTCLVKGFYPSDIAVEWESNGQPENNYKTTPPVLD
SDGSFFLYSKLTVDKSRWQQGNVFSCSVMHEALHNHYTQKSLSLSP
GK [symbol] [symbol] NWVNVISDLKKIEDLIQSMHIDATLYT
ESDVHPSCKVTAMKCFLLELQVISLESGDASIHDTVENLIILANNS
LSSNGNVTESGCKECEELEEKNIKEFLQSFVHIVQMFINTS [symbol] [symbol] [symbol]
ITCPPPMSVEHADIWVKSYSLYSRERYICNSGFKRK
AGTSSLTECVLNKATNVAHWTTPSLKCIRDPALVHQRPAPPS

[0331] Expected Cleaved Products from TEV Cleavage of P1261:

1) Fc-GGGGSENLYFQ homodimer (product from complete
cleavage)
Chains 1 and 2
(SEQ ID NO: 33)
EPKSSDKTHTCPPCPAPELLGGPSVFLFPPKPKDTLMISRTPEVTCVVVDVSHEDPEVKFNWY
VDGVEVHNAKTKPREEQYNSTYRVVSVLTVLHQDWLNGKEYKCKVSNKALPAPIEKTISKAKGQPREPQVYTLPP
SREEMTKNQVSLTCLVKGFYPSDIAVEWESNGQPENNYKTTPPVLDSDGSFFLYSKLTVDKSRWQQGNVFSCSVM
HEALHNHYTOKSLSLSPGK [symbol]
2) GGGGGS-IL-15-(GGS)5-IL-15Rα homodimer(product from complete
cleavage, active)
Chains 1 and 2
(SEQ ID NO: 34) [symbol]
NWVNVISDLKKIEDLIQSMHIDATLYTESDVHPSCKVTAMKCFLLELQVISLESGDA
SIHDTVENLIILANNSLSSNGNVTESGCKECEELEEKNIKEFLQSFVHIVQMFINTS [symbol] [symbol] ITC
PPPMSVEHADIWVKSYSLYSRERYICNSGFKRKAGISSLTECVLNKATNVAHWTTPSLKCIRDPALVHQRPAPPS
3) Fc-GGGGS-ENLYFQG-GGGGS-IL-15-(GGS)5-IL-15Rα/Fc-GGGGSENLYFQ/
GGGGGS-IL-15-(GGS)5-IL-15Rα (product from partial cleavage, active)
Chain 1: Fc-GGGGS-ENLYFQG-GGGGS-IL-15-(GGS)5-IL-15Rα
(SEQ ID NO: 35)
EPKSSDKTHTCPPCPAPELLGGPSVFLFPPKPKDTLMISRTPEVTCVVVDVSHEDPEVKFNWY
VDGVEVHNAKTKPREEQYNSTYRVVSVLTVLHQDWLNGKEYKCKVSNKALPAPIEKTISKAKGQPREPQVYTLPP
SREEMTKNQVSLTCLVKGFYPSDIAVEWESNGQPENNYKTTPPVLDSDGSFFLYSKLTVDKSRWQQGNVFSCSVM
HEALHNHYTQKSLSLSPGK [symbol] [symbol] NWVNVISDLKKIEDLIQSMHIDATLYTESDVHPSCKVTA
[sequence omitted] [symbol] [symbol]
ITCPPPMSVEHADIWVKSYSLYSRERYICNSGFKRKAGTSSLTECVLNKATNVAHWTTPS
LKCIRDPALVHQRPAPPS
Chain 2: Fc-GGGGSENLYFQ
(SEQ ID NO: 36)
EPKSSDKTHTCPPCPAPELLGGPSVFLFPPKPKDTLMISRTPEVTCVVVDVSHEDPEVKFNWY
VDGVEVHNAKTKPREEQYNSTYRVVSVLTVLHQDWLNGKEYKCKVSNKALPAPIEKTISKAKGQPREPQVYTLPP
SREEMTKNQVSLTCLVKGFYPSDIAVEWESNGQPENNYKTTPPVLDSDGSFFLYSKLTVDKSRWQQGNVFSCSVM
HEALHNHYTQKSLSLSPGK [symbol]
Chain 3: GGGGGS-IL-15-(GGS)5-IL-15Rα
(SEQ ID NO: 37) [symbol]
NWVNVISDLKKIEDLIQSMHIDATLYTESDVHPSCKVTAMKCFLLELQVISLESGDA
SIHDTVENLIILANNSLSSNGNVTESGCKECEELEEKNIKEFLQSFVHIVQMFINTS [symbol] [symbol] ITC
PPPMSVEHADIWVKSYSLYSRERYICNSGFKRKAGTSSLTECVLNKATNVAHWTTPSLKCIRDPALVHQRPAPPS
IL-15(S162A)-(GGS)5-IL-15Rα-GGGGSHHHHHH
>P1274_L15R(IL15-S162A)-G4S-his6 chains 1 and 2
(SEQ ID NO: 38)
NWVNVISDLKKIEDLIQSMHIDATLYTESDVHPSCKVTAMKCFLLELQVISLESGDASIHDTVENLI
ILANNSLSSNGNVTESGCKECEELEEKNIKEFLQSFVHIVQMFINT [symbol] [symbol] ITCPPPMSVEHAD
IWVKSYSLYSRERYICNSGFKRKAGTSSLTECVLNKATNVAHWTTPSLKCIRDPALVHQRPAPPSGGGGSHHHHH
H
IL-15-(GGS)2-EPKSSDKTHT-(GGS)2-GGGS-IL-15Rα-GGGGSHHHHHH
>P1275_L26R-G4S-his6
(SEQ ID NO: 39)
NWVNVISDLKKIEDLIQSMHIDATLYTESDVHPSCKVTAMKCFLLELQVISLESGDASIHDTVENLIILANNSLS
SNGNVTESGCKECEELEEKNIKEFLQSFVHIVQMFINTS [symbol] [symbol] ITCPPPMSVE
HADIWVKSYSLYSRERYICNSGFKRKAGTSSLTECVLNKATNVAHWTTPSLKCIRDPALVHQRPAPPSGGGGSHH
HHHH
IL-15(S162A)-(GGS)2-EPKSSDKTHT-(GGS)2-GGGS-IL-15Rα-GGGGSHHHHHH
>P1276_L26R(IL15-S162A)-G4S-his6
(SEQ ID NO: 40)
NWVNVISDLKKIEDLIQSMHIDATLYTESDVHPSCKVTAMKCFLLELQVISLESGDASIHDTVENLIILANNSLS
SNGNVTESGCKECEELEEKNIKEFLQSFVHIVQMFINT [symbol] [symbol] ITCPPPMSVE
HADIWVKSYSLYSRERYICNSGFKRKAGTSSLTECVLNKATNVAHWTTPSLKCIRDPALVHQRPAPPSGGGGSHH
HHHH
Fc-G-IL-15(S162A)-(GGS)5-IL-15Rα
>F1279__Fc-1-L15R (IL15-S162A) chains 1 and 2
(SEQ ID NO: 41)
EPKSSDKTHTCPPCPAPELLGGPSVFLFPPKPKDTLMISRTPEVTCVVVDVSHEDPEVKFNWYVDGVEVHNAKTK
PREEQYNSTYRVVSVLTVLHQDWLNGKEYKCKVSNKALPAPIEKTISKAKGQPREPQVYTLPPSREEMTKNQVSL
TCLVKGFYPSDIAVEWESNGQPENNYKTTPPVLDSDGSFFLYSKLTVDKSRWQQGNVFSCSVMHEALHNHYTQKS
LSLSPGK [symbol] NWVNVISDLKKIEDLIQSMHIDATLYTESDVHPSCKVTAMKCFLLELQVISLESGDASIHDTVENLI
ILANNSLSSNGNVTESGCKECEELEEKNIKEFLQSFVHIVQMFINT [symbol] [symbol] ITCPPPMSVEHAD
IWVKSYSLYSRERYICNSGFKRKAGTSSLTECVLNKATNVAHWTTPSLKCIRDPALVHQRPAPPS
Fc-G-IL-15(S162A)-(GGS)2-EPKSSDKTHT-(GGS)2GGGS-IL-15Rα
>F1280__Fc-1-L26R (IL15_S162A) chains 1 and 2
(SEQ ID NO: 42)
EPKSSDKTHTCPPCPAPELLGGPSVFLFPPKPKDTLMISRTPEVTCVVVDVSHEDPEVKFNWYVDGVEVHNAKTK
PREEQYNSTYRVVSVLTVLHQDWLNGKEYKCKVSNKALPAPIEKTISKAKGQPREPQVYTLPPSREEMTKNQVSL
TCLVKGFYPSDIAVEWESNGQPENNYKTTPPVLDSDGSFFLYSKLTVDKSRWQQGNVFSCSVMHEALHNHYTQKS
LSLSPGKGNWVNVISDLKKIEDLIQSMHIDATLYTESDVHPSCKVTAMKCFLLELQVISLESGDASIHDTVENLI
ILANNSLSSNGNVTESGCKECEELEEKNIKEFLQSFVHIVQMFINT [symbol] [symbol] IT
CPPPMSVEHADIWVKSYSLYSRERYICNSGFKRKAGTSSLTECVLNKATNVAHWTTPSLKCIRDPALVHQRPAPP
S
Fc-GSGGGGSENLYFQGGGGGSGS-IL-15-(GGS)5-IL-15Rα
>F1281__Fc-7-TEV-7-L15R chains 1 and 2
(SEQ ID NO: 43)
EPKSSDKTHTCPPCPAPELLGGPSVFLFPPKPKDTLMISRTPEVTCVVVDVSHEDPEVKFNWYVDGVEVHNAKTK
PREEQYNSTYRVVSVLTVLHQDWLNGKEYKCKVSNKALPAPIEKTISKAKGQPREPQVYTLPPSREEMTKNQVSL
TCLVKGFYPSDIAVEWESNGQPENNYKTTPPVLDSDGSFFLYSKLTVDKSRWQQGNVFSCSVMHEALHNHYTQKS
LSLSPGK [symbol] [symbol] NWVNVISDLKKIEDLIQSMHIDATLYTESDVHPSCKVTAMKCFLLEL
QVISLESGDASIHDTVENLIILANNSLSSNGNVTESGCKECEELEEKNIKEFLQSFVHIVQMFINTS [symbol] [symbol]
ITCPPPMSVEHADIWVKSYSLYSRERYICNSGFKRKAGTSSLTECVLNKATNVAHWTTPSLKCIRDPA
LVHQRPAPPS

[0332] Expected Cleaved Products from TEV Cleavage of P1281:

1) Fc-GSGGGGSENLYFQ homodimer (product from complete cleavage)
Chains 1 and 2
(SEQ ID NO: 44)
EPKSSDKTHTCPPCPAPELLGGPSVFLFPPKPKDTLMISRTPEVTCVVVDVSHEDPEVKFNWY
VDGVEVHNAKTKPREEQYNSTYRVVSVLTVLHQDWLNGKEYKCKVSNKALPAPIEKTISKAKGQPREPQVYTLPP
SREEMTKNQVSLTCLVKGFYPSDIAVEWESNGQPENNYKTTPPVLDSDGSFFLYSKLTVDKSRWQQGNVFSCSVM
HEALHNHYTQKSLSLSPGK [symbol]
2) GGGGGSGS-IL-15-(GGS)5-IL-15Rα homodimer(product from
complete cleavage, active)
Chains 1 and 2
(SEQ ID NO: 45) [symbol]
NWVNVISDLKKIEDLIQSMHIDATLYTESDVHPSCKVTAMKCFLLELQVISLESG
DASIHDTVENLIILANNSLSSNGNVTESGCKECEELEEKNIKEFLQSFVHIVQMFINTS [symbol] [symbol]
TCPPPMSVEHADIWVKSYSLYSRERYICNSGFKRKAGTSSLTECVLNKATNVAHWTTPSLKCIRDPALVHQRPAP
PS
3) Fc-GSGGGGS-ENLYFQG-GGGGSGS-IL-15-(GGS)5-IL-15Rα/Fc-
GSGGGGSENLYFQ/GGGGGSGS-IL-15-(GGS)5-IL-15Rα (product from partial
cleavage, active)
Chain 1: Fc-GSGGGGS-ENLYFQG-GGGGSGS-IL-15-(GGS)5-IL-15Rα
(SEQ ID NO: 46)
EPKSSDKTHTCPPCPAPELLGGPSVFLFPPKPKDTLMISRTPEVTCVVVDVSHEDPEVKFNWY
VDGVEVHNAKTKPREEQYNSTYRVVSVLTVLHQDWLNGKEYKCKVSNKALPAPIEKTISKAKGQPREPQVYTLPP
SREEMTKNQVSLTCLVKGFYPSDIAVEWESNGQPENNYKTTPPVLDSDGSFFLYSKLTVDKSRWQQGNVFSCSVM
HEALHNHYTQKSLSLSPGK [symbol] [symbol] NWVNVISDLKKIEDLIQSMHIDATLYTESDVHPSC
KVTAMKCFLLELQVISLESGDASIHDTVENLIILANNSLSSNGNVTESGCKECEELEEKNIKEFLQSFVHIVQMF
INTS [symbol] [symbol] ITCPPPMSVEHADIWVKSYSLYSRERYICNSGFKRKAGTSSLTECVLNKATNVAHW
TTPSLKCIRDPALVHQRPAPPS
Chain 2: Fc-GSGGGGSENLYFQ
(SEQ ID NO: 47)
EPKSSDKTHTCPPCPAPELLGGPSVFLFPPKPKDTLMISRTPEVTCVVVDVSHEDPEVKFNWY
VDGVEVHNAKTKPREEQYNSTYRVVSVLTVLHQDWLNGKEYKCKVSNKALPAPIEKTISKAKGQPREPQVYTLPP
SREEMTKNQVSLTCLVKGFYPSDIAVEWESNGQPENNYKTTPPVLDSDGSFFLYSKLTVDKSRWQQGNVFSCSVM
HEALHNHYTQKSLSLSPGK [symbol]
Chain 3: GGGGGSGS-IL-15-(GGS)5-IL-15Rα
(SEQ ID NO: 48) [symbol]
NWVNVISDLKKIEDLIQSMHIDATLYTESDVHPSCKVTAMKCFLLELQVISLESG
DASIHDTVENLIILANNSLSSNGNVTESGCKECEELEEKNIKEFLQSFVHIVQMFINTS [symbol] I
TCPPPMSVEHADIWVKSYSLYSRERYICNSGFKRKAGTSSLTECVLNKATNVAHWTTPSLKCIRDPALVHQRPAP
PS
Fc-GGGSGGGGSENLYFQGGGGGSGGGS-IL-15-(GGS)5-IL-15Rα
>F1282_Fc-9-TEV-9-L15R chains 1 and 2
(SEQ ID NO: 49)
EPKSSDKTHTCPPCPAPELLGGPSVFLFPPKPKDTLMISRTPEVTCVVVDVSHEDPEVKFNWYVDGVEVHNAKTK
PREEQYNSTYRVVSVLTVLHQDWLNGKEYKCKVSNKALPAPIEKTISKAKGQPREPQVYTLPPSREEMTKNQVSL
TCLVKGFYPSDIAVEWESNGQPENNYKTTPPVLDSDGSFFLYSKLTVDKSRWQQGNVFSCSVMHEALHNHYTQKS
LSLSPGK [symbol] [symbol] NWVNVISDLKKIEDLIQSMHIDATLYTESDVHPSCKVTAMKCF
LLELQVISLESGDASIHDTVENLIILANNSLSSNGNVTESGCKECEELEEKNIKEFLQSFVHIVQMFINTS [symbol] [symbol]
ITCPPPMSVEHADIWVKSYSLYSRERYICNSGFKRKAGTSSLTECVLNKATNVAHWTTPSLKCI
RDPALVHQRPAPPS

[0333] Expected Cleaved Products from TEV Cleavage of P1282:

1) Fc-GGGSGGGGSENLYFQ homodimer (product from complete cleavage)
Chains 1 and 2
(SEQ ID NO: 50)
EPKSSDKTHTCPPCPAPELLGGPSVFLFPPKPKDTLMISRTPEVTCVVVDVSHEDPEVKFNWY
VDGVEVHNAKTKPREEQYNSTYRVVSVLTVLHQDWLNGKEYKCKVSNKALPAPIEKTISKAKGQPREPQVYTLPP
SREEMTKNQVSLTCLVKGFYPSDIAVEWESNGQPENNYKTTPPVLDSDGSFFLYSKLTVDKSRWQQGNVFSCSVM
HEALHNHYTQKSLSLSPGK [symbol] [symbol]
2) GGGGGSGGGS-IL-15-(GGS)5-IL-15Rα homodimer(product from
complete cleavage, active)
Chains 1 and 2
(SEQ ID NO: 51) [symbol]
NWVNVISDLKKIEDLIQSMHIDATLYTESDVHPSCKVTAMKCFLLELQVISLE
SGDASIHDTVENLIILANNSLSSNGNVTESGCKECEELEEKNIKEFLQSFVHIVQMFINTS [symbol] [symbol] [symbol]
ITCPPPMSVEHADIWVKSYSLYSRERYICNSGFKRKAGTSSLTECVLNKATNVAHWTTPSLKCIRDPALVHQRP
APPS
3) Fc-GGGSGGGGS-ENLYFQG-GGGGSGGGS-IL-15-(GGS)5-IL-15Rα/Fc-
GGGSGGGGSENLYFQ/GGGGGSGGGS-IL-15-(GGS)5-IL-15Rα (product from partial
cleavage, active)
Chain 1: Fc-GGGSGGGGS-ENLYFQG-GGGGSGGGS-IL-15-(GGS)5-IL-15Rα
(SEQ ID NO: 52)
EPKSSDKTHTCPPCPAPELLGGPSVFLFPPKPKDTLMISRTPEVTCVVVDVSHEDPEVKFNWY
VDGVEVHNAKTKPREEQYNSTYRVVSVLTVLHQDWLNGKEYKCKVSNKALPAPIEKTISKAKGQPREPQVYTLPP
SREEMTKNQVSLTCLVKGFYPSDIAVEWESNGQPENNYKTTPPVLDSDGSFFLYSKLTVDKSRWQQGNVFSCSVM
HEALHNHYTQKSLSLSPGK [symbol] [symbol] NWVNVISDLKKIEDLIQSMHIDATLYTESDV
HPSCKVTAMKCFLLELQVISLESGDASIHDTVENLIILANNSLSSNGNVTESGCKECEELEEKNIKEFLQSFVHI
VQMFINTS [symbol] [symbol] ITCPPPMSVEHADIWVKSYSLYSRERYICNSGFKRKAGTSSLTECVLNKATN
VAHWTTPSLKCIRDPALVHQRPAPPS
Chain 2: Fc-GGGSGGGGSENLYFQ
(SEQ ID NO: 53)
EPKSSDKTHTCPPCPAPELLGGPSVFLFPPKPKDTLMISRTPEVTCVVVDVSHEDPEVKFNWY
VDGVEVHNAKTKPREEQYNSTYRVVSVLTVLHQDWLNGKEYKCKVSNKALPAPIEKTISKAKGQPREPQVYTLPP
SREEMTKNQVSLTCLVKGFYPSDIAVEWESNGQPENNYKTTPPVLDSDGSFFLYSKLTVDKSRWQQGNVFSCSVM
HEALHNHYTQKSLSLSPGK [symbol]
Chain 3: GGGGGSGGGS-IL-15-(GGS)5-IL-15Rα
(SEQ ID NO: 54) [symbol]
NWVNVISDLKKIEDLIQSMHIDATLYTESDVHPSCKVTAMKCFLLELQVISLE
SGDASIHDTVENLIILANNSLSSNGNVTESGCKECEELEEKNIKEFLQSFVHIVQMFINTS [symbol] [symbol]
ITCPPPMSVEHADIWVKSYSLYSRERYICNSGFKRKAGTSSLTECVLNKATNVAHWTTPSLKCIRDPALVHQRP
APPS
Fc-GSGGGSGGGGSENLYFQGGGGGSGGGSGS-IL-15-(GGS)5-IL-15Rα
>F1283_Fc-11-TEV-11-L15R chains 1 and 2
(SEQ ID NO: 55)
EPKSSDKTHTCPPCPAPELLGGPSVFLFPPKPKDTLMISRTPEVTCVVVDVSHEDPEVKFNWY
VDGVEVHNAKTKPREEQYNSTYRVVSVLTVLHQDWLNGKEYKCKVSNKALPAPIEKTISKAKGQPREPQVYTLPP
SREEMTKNQVSLTCLVKGFYPSDIAVEWESNGQPENNYKTTPPVLDSDGSFFLYSKLTVDKSRWQQGNVFSCSVM
HEALHNHYTQKSLSLSPGK [symbol] [symbol] [symbol] NWVNVISDLKKIEDLIQSMHIDATLYT
ESDVHPSCKVTAMKCFLLELQVISLESGDASIHDTVENLIILANNSLSSNGNVTESGCKECEELEEKNIKEFLQS
FVHIVQMFINTS [symbol] ITCPPPMSVEHADIWVKSYSLYSRERYICNSGFKRKAGTSSLTECVLN
KATNVAHWTTPSLKCIRDPALVHQRPAPPS

[0334] Expected Cleaved Products from TEV Cleavage of P1283:

1) Fc-GSGGGSGGGGSENLYFQ homodimer (product from complete cleavage)
Chains 1 and 2
(SEQ ID NO: 56)
EPKSSDKTHTCPPCPAPELLGGPSVFLFPPKPKDTLMISRTPEVTCVVVDVSHEDPEVKFNWY
VDGVEVHNAKTKPREEQYNSTYRVVSVLTVLHQDWLNGKEYKCKVSNKALPAPIEKTISKAKGQPREPQVYTLPP
SREEMTKNQVSLTCLVKGFYPSDIAVEWESNGQPENNYKTTPPVLDSDGSFFLYSKLTVDKSRWQQGNVFSCSVM
HEALHNHYTQKSLSLSPGK [symbol] [symbol]
2) GGGGGSGGGSGS-IL-15-(GGS)5-IL-15Rα homodimer(product from
complete cleavage, active)
Chains 1 and 2
(SEQ ID NO: 57) [symbol]
NWVNVISDLKKIEDLIQSMHIDATLYTESDVHPSCKVTAMKCFLLELQVIS
LESGDASIHDTVENLIILANNSLSSNGNVTESGCKECEELEEKNIKEFLQSFVHIVQMFINTS [symbol] [symbol]
ITCPPPMSVEHADIWVKSYSLYSRERYICNSGFKRKAGTSSLTECVLNKATNVAHWTTPSLKCIRDPALVHQ
RPAPPS
3) Fc-GSGGGSGGGGS-ENLYFQG-GGGGSGGGSGS-IL-15-(GGS)5-IL-15Rα/Fc-
GSGGGSGGGGSENLYFQ/GGGGGSGGGSGS-IL-15-(GGS)5-IL-15Rα (product from partial
cleavage, active)
Chain 1: Fc-GSGGGSGGGGS-ENLYFQG-GGGGSGGGSGS-IL-15-(GGS)5-IL-15Rα
(SEQ ID NO: 58)
EPKSSDKTHTCPPCPAPELLGGPSVFLFPPKPKDTLMISRTPEVTCVVVDVSHEDPEVKFNWY
VDGVEVHNAKTKPREEQYNSTYRVVSVLTVLHQDWLNGKEYKCKVSNKALPAPIEKTISKAKGQPREPQVYTLPP
SREEMTKNQVSLTCLVKGFYPSDIAVEWESNGQPENNYKTTPPVLDSDGSFFLYSKLTVDKSRWQQGNVFSCSVM
HEALHNHYTQKSLSLSPGK [symbol] [symbol] [symbol] NWVNVISDLKKIEDLIQSMHIDATLYT
ESDVHPSCKVTAMKCFLLELQVISLESGDASIHDTVENLIILANNSLSSNGNVTESGCKECEELEEKNIKEFLQS
FVHIVQMFINTS [symbol] [symbol] ITCPPPMSVEHADIWVKSYSLYSRERYICNSGFKRKAGTSSLTECVLN
KATNVAHWTTPSLKCIRDPALVHQRPAPPS
Chain 2: Fc-GSGGGSGGGGSENLYFQ
(SEQ ID NO: 59)
EPKSSDKTHTCPPCPAPELLGGPSVFLFPPKPKDTLMISRTPEVTCVVVDVSHEDPEVKFNWY
VDGVEVHNAKTKPREEQYNSTYRVVSVLTVLHQDWLNGKEYKCKVSNKALPAPIEKTISKAKGQPREPQVYTLPP
SREEMTKNQVSLTCLVKGFYPSDIAVEWESNGQPENNYKTTPPVLDSDGSFFLYSKLTVDKSRWQQGNVFSCSVM
HEALHNHYTQKSLSLSPGK [symbol] [symbol]
Chain 3: GGGGGSGGGSGS-IL-15-(GGS)5-IL-15Rα
(SEQ ID NO: 60) [symbol] [symbol]
NWVNVISDLKKIEDLIQSMHIDATLYTESDVHPSCKVTAMKCFLLELQVIS
LESGDASIHDTVENLIILANNSLSSNGNVTESGCKECEELEEKNIKEFLQSFVHIVQMFINTS [symbol] [symbol]
ITCPPPMSVEHADIWVKSYSLYSRERYICNSGFKRKAGTSSLTECVLNKATNVAHWTTPSLKCIRDPALVHQ
RPAPPS
Fc-GGGSGGGSGGGGSENLYFQGGGGGSGGGSGGGS-IL-15-(GGS)5-IL-15Rα
>F1284_Fc-13-TEV-13-L15R chains 1 and 2
(SEQ ID NO: 61)
EPKSSDKTHTCPPCPAPELLGGPSVFLFPPKPKDTLMISRTPEVTCVVVDVSHEDPEVKFNWYVDGVEVHNAKTK
PREEQYNSTYRVVSVLTVLHQDWLNGKEYKCKVSNKALPAPIEKTISKAKGQPREPQVYTLPPSREEMTKNQVSL
TCLVKGFYPSDIAVEWESNGQPENNYKTTPPVLDSDGSFFLYSKLTVDKSRWQQGNVFSCSVMHEALHNHYTQKS
LSLSPGK [symbol] [symbol] [symbol] NWVNVISDLKKIEDLIQSMHIDATLYTESDVHPSC
KVTAMKCFLLELQVISLESGDASIHDTVENLIILANNSLSSNGNVTESGCKECEELEEKNIKEFLQSFVHIVQMF
INTS [symbol] ITCPPPMSVEHADIWVKSYSLYSRERYICNSGFKRKAGTSSLTECVLNKATNVAHW
TTPSLKCIRDPALVHQRPAPPS

[0335] Expected Cleaved Products from TEV Cleavage of P1284:

1) Fc-GGGSGGGSGGGGSENLYFQ homodimer (product from complete cleavage)
Chains 1 and 2
(SEQ ID NO: 62)
EPKSSDKTHTCPPCPAPELLGGPSVFLFPPKPKDTLMISRTPEVTCVVVDVSHEDPEVKFNWY
VDGVEVHNAKTKPREEQYNSTYRVVSVLTVLHQDWLNGKEYKCKVSNKALPAPIEKTISKAKGQPREPQVYTLPP
SREEMTKNQVSLTCLVKGFYPSDIAVEWESNGQPENNYKTTPPVLDSDGSFFLYSKLTVDKSRWQQGNVFSCSVM
HEALHNHYTQKSLSLSPGK [symbol] [symbol]
2) GGGGGSGGGSGGGS-IL-15-(GGS)5-IL-15Rα homodimer(product from
complete cleavage, active)
Chains 1 and 2
(SEQ ID NO: 63) [symbol]
NWVNVISDLKKIEDLIQSMHIDATLYTESDVHPSCKVTAMKCFLLELQV
ISLESGDASIHDTVENLIILANNSLSSNGNVTESGCKECEELEEKNIKEFLQSFVHIVQMFINTS [symbol] [symbol]
ITCPPPMSVEHADIWVKSYSLYSRERYICNSGFKRKAGTSSLTECVLNKATNVAHWTTPSLKCIRDPALV
HQRPAPPS
3) Fc-GGGSGGGSGGGGS-ENLYFQG-GGGGSGGGSGGGS-IL-15-(GGS)5-IL-
15Rα/Fc-GGGSGGGSGGGGSENLYFQ/GGGGGSGGGSGGGS-IL-15-(GGS)5-IL-15Rα (product
from partial cleavage, active)
Chain 1: Fc-GGGSGGGSGGGGS-ENLYFQG-GGGGSGGGSGGGS-IL-15-(GGS)5-IL-15Rα
(SEQ ID NO: 64)
EPKSSDKTHTCPPCPAPELLGGPSVFLFPPKPKDTLMISRTPEVTCVVVDVSHEDPEVKFNWY
VDGVEVHNAKTKPREEQYNSTYRVVSVLTVLHQDWLNGKEYKCKVSNKALPAPIEKTISKAKGQPREPQVYTLPP
SREEMTKNQVSLTCLVKGFYPSDIAVEWESNGQPENNYKTTPPVLDSDGSFFLYSKLTVDKSRWQQGNVFSCSVM
HEALHNHYTQKSLSLSPGK [symbol] [symbol] [symbol] NWVNVISDLKKIEDLIQSMHIDA
TLYTESDVHPSCKVTAMKCFLLELQVISLESGDASIHDTVENLIILANNSLSSNGNVTESGCKECEELEEKNIKE
FLQSFVHIVQMFINTS [symbol] ITCPPPMSVEHADIWVKSYSLYSRERYICNSGFKRKAGTSSLTE
CVLNKATNVAHWTTPSLKCIRDPALVHQRPAPPS
Chain 2: Fc-GGGSGGGSGGGGSENLYFQ
(SEQ ID NO: 65)
EPKSSDKTHTCPPCPAPELLGGPSVFLFPPKPKDTLMISRTPEVTCVVVDVSHEDPEVKFNWY
VDGVEVHNAKTKPREEQYNSTYRVVSVLTVLHQDWLNGKEYKCKVSNKALPAPIEKTISKAKGQPREPQVYTLPP
SREEMTKNQVSLTCLVKGFYPSDIAVEWESNGQPENNYKTTPPVLDSDGSFFLYSKLTVDKSRWQQGNVFSCSVM
HEALHNHYTQKSLSLSPGK [symbol] [symbol]
Chain 3: GGGGGSGGGSGGGS-IL-15-(GGS)5-IL-15Rα
(SEQ ID NO: 66) [symbol] [symbol]
NWVNVISDLKKIEDLIQSMHIDATLYTESDVHPSCKVTAMKCFLLELQV
ISLESGDASIHDTVENLIILANNSLSSNGNVTESGCKECEELEEKNIKEFLQSFVHIVQMFINTS [symbol] [symbol]
ITCPPPMSVEHADIWVKSYSLYSRERYICNSGFKRKAGTSSLTECVLNKATNVAHWTTPSLKCIRDPALV
HQRPAPPS
Fc-GSGGGSGGGSGGGGSENLYFQGGGGGSGGGSGGGSGS-IL-15-(GGS)5-IL-15Rα
>F1285_Fc-15-TEV-15-L15R chains 1 and 2
(SEQ ID NO: 67)
EPKSSDKTHTCPPCPAPELLGGPSVFLFPPKPKDTLMISRTPEVTCVVVDVSHEDPEVKFNWYVDGVEVHNAKTK
PREEQYNSTYRVVSVLTVLHQDWLNGKEYKCKVSNKALPAPIEKTISKAKGQPREPQVYTLPPSREEMTKNQVSL
TCLVKGFYPSDIAVEWESNGQPENNYKTTPPVLDSDGSFFLYSKLTVDKSRWQQGNVFSCSVMHEALHNHYTQKS
LSLSPGK [symbol] [symbol] [symbol] [symbol] NWVNVISDLKKIEDLIQSMHIDATLYTESDV
HPSCKVTAMKCFLLELQVISLESGDASIHDTVENLIILANNSLSSNGNVTESGCKECEELEEKNIKEFLQSFVHI
VQMFINTS [symbol] ITCPPPMSVEHADIWVKSYSLYSRERYICNSGFKRKAGTSSLTECVLNKATN
VAHWTTPSLKCIRDPALVHQRPAPPS

[0336] Expected Cleaved Products from TEV Cleavage of P1285:

1) Fc-GSGGGSGGGSGGGGSENLYFQ homodimer (product from complete cleavage)
Chains 1 and 2
(SEQ ID NO: 68)
EPKSSDKTHTCPPCPAPELLGGPSVFLFPPKPKDTLMISRTPEVTCVVVDVSHEDPEVKFNWY
VDGVEVHNAKTKPREEQYNSTYRVVSVLTVLHQDWLNGKEYKCKVSNKALPAPIEKTISKAKGQPREPQVYTLPP
SREEMTKNQVSLTCLVKGFYPSDIAVEWESNGQPENNYKTTPPVLDSDGSFFLYSKLTVDKSRWQQGNVFSCSVM
HEALHNHYTQKSLSLSPGK [symbol] [symbol]
2) GGGGGSGGGSGGGSGS-IL-15-(GGS)5-IL-15Rα homodimer(product from
complete cleavage, active)
Chains 1 and 2
(SEQ ID NO: 69) [symbol] [symbol]
NWVNVISDLKKIEDLIQSMHIDATLYTESDVHPSCKVTAMKCFLLEL
QVISLESGDASIHDTVENLIILANNSLSSNGNVTESGCKECEELEEKNIKEFLQSFVHIVQMFINTS [symbol] [symbol]
ITCPPPMSVEHADIWVKSYSLYSRERYICNSGFKRKAGTSSLTECVLNKATNVAHWTTPSLKCIRDPA
LVHQRPAPPS
3) Fc-GSGGGSGGGSGGGGS-ENLYFQG-GGGGSGGGSGGGSGS-IL-15-(GGS)5-IL-
15Rα/Fc-GSGGGSGGGSGGGGSENLYFQ/GGGGGSGGGSGGGSGS-IL-15-(GGS)5-IL-15Rα
(product from partial cleavage, active)
Chain 1: Fc-GSGGGSGGGSGGGGS-ENLYFQG-GGGGSGGGSGGGSGS-IL-15-(GGS)5-IL-15Rα
(SEQ ID NO: 70)
EPKSSDKTHTCPPCPAPELLGGPSVFLFPPKPKDTLMISRTPEVTCVVVDVSHEDPEVKFNWY
VDGVEVHNAKTKPREEQYNSTYRVVSVLTVLHQDWLNGKEYKCKVSNKALPAPIEKTISKAKGQPREPQVYTLPP
SREEMTKNQVSLTCLVKGFYPSDIAVEWESNGQPENNYKTTPPVLDSDGSFFLYSKLTVDKSRWQQGNVFSCSVM
HEALHNHYTQKSLSLSPGK [symbol] [symbol] [symbol] NWVNVISDLKKIEDLIQSM
HIDATLYTESDVHPSCKVTAMKCFLLELQVISLESGDASIHDTVENLIILANNSLSSNGNVTESGCKECEELEEK
NIKEFLQSFVHIVQMFINTS [symbol] ITCPPPMSVEHADIWVKSYSLYSRERYICNSGFKRKAGTS
SLTECVLNKATNVAHWTTPSLKCIRDPALVHQRPAPPS
Chain 2: Fc-GSGGGSGGGSGGGGSENLYFQ
(SEQ ID NO: 71)
EPKSSDKTHTCPPCPAPELLGGPSVFLFPPKPKDTLMISRTPEVTCVVVDVSHEDPEVKFNWY
VDGVEVHNAKTKPREEQYNSTYRVVSVLTVLHQDWLNGKEYKCKVSNKALPAPIEKTISKAKGQPREPQVYTLPP
SREEMTKNQVSLTCLVKGFYPSDIAVEWESNGQPENNYKTTPPVLDSDGSFFLYSKLTVDKSRWQQGNVFSCSVM
HEALHNHYTQKSLSLSPGK [symbol] [symbol]
Chain 3: GGGGGSGGGSGGGSGS-IL-15-(GGS)5-IL-15Rα
(SEQ ID NO: 72) [symbol] [symbol]
NWVNVISDLKKIEDLIQSMHIDATLYTESDVHPSCKVTAMKCFLLEL
QVISLESGDASIHDTVENLIILANNSLSSNGNVTESGCKECEELEEKNIKEFLQSFVHIVQMFINTS [symbol] [symbol]
ITCPPPMSVEHADIWVKSYSLYSRERYICNSGFKRKAGTSSLTECVLNKATNVAHWTTPSLKCIRDPA
LVHQRPAPPS
IL-15-GGSGGSEPKSSDKTHTGGSGGSGGGS-IL-15Rα-G45-Fc
>P1331_L26R-stable-Fc chains 1 and 2
(SEQ ID NO: 73)
NWVNVISDLKKIEDLIQSMHIDATLYTESDVHPSCKVTAMKCFLLELQVISLESGDASIHDTVENLIILANNSLS
SNGNVTESGCKECEELEEKNIKEFLQSFVHIVQMFINTS [symbol] [symbol] ITCPPPMSVE
HADIWVKSYSLYSRERYICNSGFKRKAGTSSLTECVLNKATNVAHWTTPSLKCIRDPALVHQRPAPPS [symbol] EP
KSSDKTHTCPPCPAPELLGGPSVFLFPPKPKDTLMISRTPEVTCVVVDVSHEDPEVKFNWYVDGVEVHNAKTKPR
EEQYNSTYRVVSVLTVLHQDWLNGKEYKCKVSNKALPAPIEKTISKAKGQPREPQVYTLPPSREEMTKNQVSLTC
LVKGFYPSDIAVEWESNGQPENNYKTTPPVLDSDGSFFLYSKLTVDKSRWQQGNVFSCSVMHEALHNHYTQKSLS
LSPGK
IL-15-(GGS)5-IL-15Rα-Fc-a
>P1332_L15R-Fc-a chains 1 and 2
(SEQ ID NO: 74)
NWVNVISDLKKIEDLIQSMHIDATLYTESDVHPSCKVTAMKCFLLELQVISLESGDASIHDTVENLI
ILANNSLSSNGNVTESGCKECEELEEKNIKEFLQSFVHIVQMFINTS [symbol] ITCPPPMSVEHAD
IWVKSYSLYSRERYICNSGFKRKAGTSSLTECVLNKATNVAHWTTPSLKCIRDPALVHQRPAPPS

[symbol]

[symbol]

[symbol]

[symbol]

[symbol]

[symbol]

[symbol]

[symbol]

[symbol]

[symbol]

[symbol]

[symbol]

[symbol]

[symbol]

[symbol]

[symbol]

IL-15-GGSGGSEPKSSDKTHTGGSGGSGGGS-IL-15Rα-Fc-a
>P1333_L26R-Fc-a chains 1 and 2
(SEQ ID NO: 75)
NWVNVISDLKKIEDLIQSMHIDATLYTESDVHPSCKVTAMKCFLLELQVISLESGDASIHDTVENLI
ILANNSLSSNGNVTESGCKECEELEEKNIKEFLQSFVHIVQMFINTS [symbol] [symbol] IT
CPPPMSVEHADIWVKSYSLYSRERYICNSGFKRKAGTSSLTECVLNKATNVAHWTTPSLKCIRDPALVHQRPAPP
S

[symbol]

[symbol]

[symbol]

[symbol]

[symbol]

[symbol]

[symbol]

[symbol]

[symbol]

[symbol]

[symbol]

[symbol]

[symbol]

[symbol]

[symbol]

[symbol]

Fc-b-GSLGGSGRSANAGS-IL-15(S162A)-(GGS)5-IL-15Rα
>P1334_Fc-b-PS1-L15R-S162A chains 1 and 2
(SEQ ID NO: 76)
EPKSSDKTHTCPPCPAPEAAGGPSVFLFPPKPKDTLYITREPEVTCVVVDVSHEDPEVKFNWYVDGVEVHNAKTK
PREEQYNSTYRVVSVLTVLHQDWLNGKEYKCKVSNKALAAPIEKTISKAKGQPREPQVYTLPPSREEMTKNQVSL
TCLVKGFYPSDIAVEWESNGQPENNYKTTPPVLDSDGSFFLYSKLTVDKSRWQQGNVFSCSVMHEALHNHYTQKS
LSLSPGK [symbol] [symbol] NWVNVISDLKKIEDLIQSMHIDATLYTESDVHPSCKVTAMKCFLLELQVISLES
GDASIHDTVENLIILANNSLSSNGNVTESGCKECEELEEKNIKEFLQSFVHIVQMFINT [symbol] [symbol]
ITCPPPMSVEHADIWVKSYSLYSRERYICNSGFKRKAGTSSLTECVLNKATNVAHWTTPSLKCIRDPALVHQRPA
PPS

[0337] Expected Cleavage Products from uPA or Matriptase Cleavage of P1334:

1) Fc-b-GSLGGSGR homodimer (product from complete cleavage)
Chains 1 and 2
(SEQ ID NO: 77)
EPKSSDKTHTCPPCPAPEAAGGPSVFLFPPKPKDTLYITREPEVTCVVVDVSHEDPEVKFNWY
VDGVEVHNAKTKPREEQYNSTYRVVSVLTVLHQDWLNGKEYKCKVSNKALAAPIEKTISKAKGQPREPQVYTLPP
SREEMTKNQVSLTCLVKGFYPSDIAVEWESNGQPENNYKTTPPVLDSDGSFFLYSKLTVDKSRWQQGNVFSCSVM
HEALHNHYTQKSLSLSPGK [symbol]
2) SANAGS-IL-15-(GGS)5-IL-15Rα homodimer(product from complete
cleavage, active)
Chains 1 and 2
(SEQ ID NO: 78) [symbol]
NWVNVISDLKKIEDLIQSMHIDATLYTESDVHPSCKVTAMKCFLLELQVISLESGDA
SIHDTVENLIILANNSLSSNGNVTESGCKECEELEEKNIKEFLQSFVHIVQMFINT [symbol] [symbol] ITC
PPPMSVEHADIWVKSYSLYSRERYICNSGFKRKAGTSSLTECVLNKATNVAHWTTPSLKCIRDPALVHQRPAPPS
3)Fc-b-GSLGGSGRSANAGS-IL-15(S162A)-(GGS)5-IL-15Rα/Fc-b-GSLGGSGR/
SANAGS-IL-15-(GGS)5-IL-15Rα (product from partial cleavage, active)
Chain 1: Fc-b-GSLGGSGRSANAGS-IL-15(S162A)-(GGS)5-IL-15Rα
(SEQ ID NO: 79)
EPKSSDKTHTCPPCPAPEAAGGPSVFLFPPKPKDTLYITREPEVTCVVVDVSHEDPEVKFNWY
VDGVEVHNAKTKPREEQYNSTYRVVSVLTVLHQDWLNGKEYKCKVSNKALAAPIEKTISKAKGQPREPQVYTLPP
SREEMTKNQVSLTCLVKGFYPSDIAVEWESNGQPENNYKTTPPVLDSDGSFFLYSKLTVDKSRWQQGNVFSCSVM
HEALHNHYTQKSLSLSPGK [symbol] [symbol] NWVNVISDLKKIEDLIQSMHIDATLYTESDVHPSCKVTAMKC
FLLELQVISLESGDASIHDTVENLIILANNSLSSNGNVTESGCKECEELEEKNIKEFLQSFVHIVQMFINT [symbol] [symbol]
ITCPPPMSVEHADIWVKSYSLYSRERYICNSGFKRKAGTSSLTECVLNKATNVAHWTTPSLKC
IRDPALVHQRPAPPS
Chain 2: Fc-b-GSLGGSGR
(SEQ ID NO: 80)
EPKSSDKTHTCPPCPAPEAAGGPSVFLFPPKPKDTLYITREPEVTCVVVDVSHEDPEVKFNWY
VDGVEVHNAKTKPREEQYNSTYRVVSVLTVLHQDWLNGKEYKCKVSNKALAAPIEKTISKAKGQPREPQVYTLPP
SREEMTKNQVSLTCLVKGFYPSDIAVEWESNGQPENNYKTTPPVLDSDGSFFLYSKLTVDKSRWQQGNVFSCSVM
HEALHNHYTQKSLSLSPGK [symbol]
Chain 3: SANAGS-IL-15-(GGS)5-IL-15Rα
(SEQ ID NO: 81) [symbol]
NWVNVISDLKKIEDLIQSMHIDATLYTESDVHPSCKVTAMKCFLLELQVISLESGDA
SIHDTVENLIILANNSLSSNGNVTESGCKECEELEEKNIKEFLQSFVHIVQMFINTA [symbol] [symbol] TC
PPPMSVEHADIWVKSYSLYSRERYICNSGFKRKAGTSSLTECVLNKATNVAHWTTPSLKCIRDPALVHQRPAPPS

[0338] Expected Cleavage Products from Legumain Cleavage of P1334:

1) Fc-b-GSLGGSGRSAN homodimer (product from
complete cleavage)
Chains 1 and 2
(SEQ ID NO: 82)
EPKSSDKTHTCPPCPAPEAAGGPSVFLFPPKPKDTLYITREPEVTCV
VVDVSHEDPEVKFNWYVDGVEVHNAKTKPREEQYNSTYRVVSVLTVL
HQDWLNGKEYKCKVSNKALAAPIEKTISKAKGQPREPQVYTLPPSRE
EMTKNQVSLTCLVKGFYPSDIAVEWESNGQPENNYKTTPPVLDSDGS
FFLYSKLTVDKSRWQQGNVFSCSVMHEALHNHYTQKSLSLSPGK

[symbol]

2) AGS-IL-15-(GGS)5-IL-15Rα (homodimer(product
from complete cleavage, active)
Chains 1 and 2
(SEQ ID NO: 83) [symbol]
NWVNVISDLKKIEDLIQSMHIDATLYTESDVHPSCKVTAMKCFL
LELQVISLESGDASIHDTVENLIILANNSLSSNGNVTESGCKECEEL
EEKNIKEFLQSFVHIVQMFINTA [symbol] [symbol] ITCPPPMSV
EHADIWVKSYSLYSRERYICNSGFKRKAGTSSLTECVLNKATNVAHW
TTPSLKCIRDPALVHQRPAPPS
3) Fc-b-GSLGGSGRSANAGS-IL-15(S162A)-(GGS)5-IL-
15Rα/Fc-b-GSLGGSGRSAN/AGS-IL-15-(GGS)5-IL-15Rα
(product from partial cleavage, active
Chain 1: Fc-b-GSLGGSGRSANAGS-IL-15(S162A)-
(GGS)5-IL-15Rα
(SEQ ID NO: 84)
EPKSSDKTHTCPPCPAPEAAGGPSVFLFPPKPKDTLYITREPEVTCV
VVDVSHEDPEVKFNWYVDGVEVHNAKTKPREEQYNSTYRVVSVLTVL
HQDWLNGKEYKCKVSNKALAAPIEKTISKAKGQPREPQVYTLPPSRE
EMTKNQVSLTCLVKGFYPSDIAVEWESNGQPENNYKTTPPVLDSDGS
FFLYSKLTVDKSRWQQGNVFSCSVMHEALHNHYTQKSLSLSPGK [symbol] [symbol]
NWVNVISDLKKIEDLIQSMHIDATLYTESDVHPSCK
VTAMKCFLLELQVISLESGDASIHDTVENLIILANNSLSSNGNVTES
GCKECEELEEKNIKEFLQSFVHIVQMFINTA [symbol] [symbol] I
TCPPPMSVEHADIWVKSYSLYSRERYICNSGFKRKAGTSSLTECVLN
KATNVAHWTTPSLKCIRDPALVHQRPAPPS
Chain 2: Fc-b-GSLGGSGRSAN
(SEQ ID NO: 85)
EPKSSDKTHTCPPCPAPEAAGGPSVFLFPPKPKDTLYITREPEVTCV
VVDVSHEDPEVKFNWYVDGVEVHNAKTKPREEQYNSTYRVVSVLTVL
HQDWLNGKEYKCKVSNKALAAPIEKTISKAKGQPREPQVYTLPPSRE
EMTKNQVSLTCLVKGFYPSDIAVEWESNGQPENNYKTTPPVLDSDGS
FFLYSKLTVDKSRWQQGNVFSCSVMHEALHNHYTQKSLSLSPGK

[symbol]

Chain 3: AGS-IL-15-(GGS)5-IL-15Rα
(SEQ ID NO: 86) [symbol]
NWVNVISDLKKIEDLIQSMHIDATLYTESDVHPSCKVTAMKCFL
LELQVISLESGDASIHDTVENLIILANNSLSSNGNVTESGCKECEEL
EEKNIKEFLQSFVHIVQMFINTA [symbol] [symbol] ITCPPPMSV
EHADIWVKSYSLYSRERYICNSGFKRKAGTSSLTECVLNKATNVAHW
TTPSLKCIRDPALVHQRPAPPS
Fc-b-GGSLSGRSANAGGS-IL-15(S162A)-(GGS)5-IL-15Rα
>P1335_Fc-b-PS2-L15R-S162A chains 1 and 2
(SEQ ID NO: 87)
EPKSSDKTHTCPPCPAPEAAGGPSVFLFPPKPKDTLYITREPEVTCV
VVDVSHEDPEVKFNWYVDGVEVHNAKTKPREEQYNSTYRVVSVLTVL
HQDWLNGKEYKCKVSNKALAAPIEKTISKAKGQPREPQVYTLPPSRE
EMTKNQVSLTCLVKGFYPSDIAVEWESNGQPENNYKTTPPVLDSDGS
FFLYSKLTVDKSRWQQGNVFSCSVMHEALHNHYTQKSLSLSPGK [symbol] [symbol]
NWVNVISDLKKIEDLIQSMHIDATLYTESDVHP
SCKVTAMKCFLLELQVISLESGDASIHDTVENLIILANNSLSSNGNV
TESGCKECEELEEKNIKEFLQSFVHIVQMFINTA [symbol] [symbol]
ITCPPPMSVEHADIWVKSYSLYSRERYICNSGFKR
KAGTSSLTECVLNKATNVAHWTTPSLKCIRDPALVHQRPAPPS

[0339] Expected Cleavage Products from uPA or Matriptase Cleavage of P1335:

1) Fc-b-GGSLSGR homodimer (product from
complete cleavage)
Chains 1 and 2
(SEQ ID NO: 88)
EPKSSDKTHTCPPCPAPEAAGGPSVFLFPPKPKDTLYITREPEVTCV
VVDVSHEDPEVKFNWYVDGVEVHNAKTKPREEQYNSTYRVVSVLTVL
HQDWLNGKEYKCKVSNKALAAPIEKTISKAKGQPREPQVYTLPPSRE
EMTKNQVSLTCLVKGFYPSDIAVEWESNGQPENNYKTTPPVLDSDGS
FFLYSKLTVDKSRWQQGNVFSCSVMHEALHNHYTQKSLSLSPGK

[symbol]

2) SANAGGS-IL-15-(GGS)5-IL-15Rα homodimer
(product from complete cleavage, active)
Chains 1 and 2
(SEQ ID NO: 89) [symbol]
NWVNVISDLKKIEDLIQSMHIDATLYTESDVHPSCKVTAM
KCFLLELQVISLESGDASIHDTVENLIILANNSLSSNGNVTESGCKECEE
LEEKNIKEFLQSFVHIVQMFINTA [symbol] [symbol] ITCPP
PMSVEHADIWVKSYSLYSRERYICNSGFKRKAGTSSLTECVLNKATN
VAHWTTPSLKCIRDPALVHQRPAPPS
3) Fc-b-GGSLSGRSANAGGS-IL-15(S162A)-(GGS)5-IL-
15Rα/Fc-b-GGSLSGR/SANAGGS-IL-15-(GGS)5-IL-15Rα
(product from partial cleavage, active)
Chain 1: Fc-b-GGSLSGRSANAGGS-IL-15(S162A)-
(GGS)5-IL-15Rα
(SEQ ID NO: 90)
EPKSSDKTHTCPPCPAPEAAGGPSVFLFPPKPKDTLYITREPEVTCV
VVDVSHEDPEVKFNWYVDGVEVHNAKTKPREEQYNSTYRVVSVLTVL
HQDWLNGKEYKCKVSNKALAAPIEKTISKAKGQPREPQVYTLPPSRE
EMTKNQVSLTCLVKGFYPSDIAVEWESNGQPENNYKTTPPVLDSDGS
FFLYSKLTVDKSRWQQGNVFSCSVMHEALHNHYTQKSLSLSPGK [symbol] [symbol]
NWVNVISDLKKIEDLIQSMHIDATLYTESDV
HPSCKVTAMKCFLLELQVISLESGDASIHDTVENLIILANNSLSSNGNV
TESGCKECEELEEKNIKEFLQSFVHIVQMFINTA [symbol] [symbol] [symbol]
ITCPPPMSVEHADIWVKSYSLYSRERYICNSGFKRKAGTS
SLTECVLNKATNVAHWTTPSLKCIRDPALVHQRPAPPS
Chain 2: Fc-b-GGSLSGR
(SEQ ID NO: 91)
EPKSSDKTHTCPPCPAPEAAGGPSVFLFPPKPKDTLYITREPEVTCV
VVDVSHEDPEVKFNWYVDGVEVHNAKTKPREEQYNSTYRVVSVLTVL
HQDWLNGKEYKCKVSNKALAAPIEKTISKAKGQPREPQVYTLPPSRE
EMTKNQVSLTCLVKGFYPSDIAVEWESNGQPENNYKTTPPVLDSDGS
FFLYSKLTVDKSRWQQGNVFSCSVMHEALHNHYTQKSLSLSPGK

[symbol]

Chain 3: SANAGGS-IL-15-(GGS)5-IL-15Rα
(SEQ ID NO: 92) [symbol]
NWVNVISDLKKIEDLIQSMHIDATLYTESDVHPSCKVTAM
KCFLLELQVISLESGDASIHDTVENLIILANNSLSSNGNVTESGCKECEEL
EEKNIKEFLQSFVHIVQMFINTA [symbol] [symbol] ITCPP
PMSVEHADIWVKSYSLYSRERYICNSGFKRKAGTSSLTECVLNKATN
VAHWTTPSLKCIRDPALVHQRPAPPS

[0340] Expected Cleavage Products from Legumain Cleavage of P1335:

1) Fc-b-GGSLSGRSAN homodimer (product from
complete cleavage)
Chains 1 and 2
(SEQ ID NO: 93)
EPKSSDKTHTCPPCPAPEAAGGPSVFLFPPKPKDTLYITREPEVTCV
VVDVSHEDPEVKFNWYVDGVEVHNAKTKPREEQYNSTYRVVSVLTVL
HQDWLNGKEYKCKVSNKALAAPIEKTISKAKGQPREPQVYTLPPSRE
EMTKNQVSLTCLVKGFYPSDIAVEWESNGQPENNYKTTPPVLDSDGS
FFLYSKLTVDKSRWQQGNVFSCSVMHEALHNHYTQKSLSLSPGK

[symbol]

2) AGGS-IL-15-(GGS)5-IL-15Rα homodimer (product
from complete cleavage, active)
Chains 1 and 2
(SEQ ID NO: 94) [symbol]
NWVNVISDLKKIEDLIQSMHIDATLYTESDVHPSCKVTAMKCF
LLELQVISLESGDASIHDTVENLIILANNSLSSNGNVTESGCKECEE
LEEKNIKEFLQSFVHIVQMFINTA [symbol] [symbol] ITCPPPMS
VEHADIWVKSYSLYSRERYICNSGFKRKAGTSSLTECVLNKATNVAH
WTTPSLKCIRDPALVHQRPAPPS
3) Fc-b-GGSLSGRSANAGGS-IL-15(S162A)-(GGS)5-IL-
15Rα/Fc-b-GGSLSGRSAN/AGGS-IL-15-(GGS)5-IL-15Rα
(product from partial cleavage, active)
Chain 1: Fc-b-GGSLSGRSANAGGS-IL-15(S162A)-
(GGS)5-IL-15Rα
(SEQ ID NO: 95)
EPKSSDKTHTCPPCPAPEAAGGPSVFLFPPKPKDTLYITREPEVTCV
VVDVSHEDPEVKFNWYVDGVEVHNAKTKPREEQYNSTYRVVSVLTVL
HQDWLNGKEYKCKVSNKALAAPIEKTISKAKGQPREPQVYTLPPSRE
EMTKNQVSLTCLVKGFYPSDIAVEWESNGQPENNYKTTPPVLDSDGS
FFLYSKLTVDKSRWQQGNVFSCSVMHEALHNHYTQKSLSLSPGK [symbol] [symbol]
NWVNVISDLKKIEDLIQSMHIDATLYTESDVHP
SCKVTAMKCFLLELQVISLESGDASIHDTVENLIILANNSLSSNGNV
TESGCKECEELEEKNIKEFLQSFVHIVQMFINTA [symbol] [symbol]
ITCPPPMSVEHADIWVKSYSLYSRERYICNSGFKRKAGTSSLTECVL
NKATNVAHWTTPSLKCIRDPALVHQRPAPPS
Chain 2: Fc-b-GGSLSGRSAN
(SEQ ID NO: 96)
EPKSSDKTHTCPPCPAPEAAGGPSVFLFPPKPKDTLYITREPEVTCV
VVDVSHEDPEVKFNWYVDGVEVHNAKTKPREEQYNSTYRVVSVLTVL
HQDWLNGKEYKCKVSNKALAAPIEKTISKAKGQPREPQVYTLPPSRE
EMTKNQVSLTCLVKGFYPSDIAVEWESNGQPENNYKTTPPVLDSDGS
FFLYSKLTVDKSRWQQGNVFSCSVMHEALHNHYTQKSLSLSPGK

[symbol]

Chain 3: AGGS-IL-15-(GGS)5-IL-15Rα
(SEQ ID NO: 97) [symbol]
NWVNVISDLKKIEDLIQSMHIDATLYTESDVHPSCKVTAMKCF
LLELQVISLESGDASIHDTVENLIILANNSLSSNGNVTESGCKECEE
LEEKNIKEFLQSFVHIVQMFINTA [symbol] [symbol] ITCPPPMS
VEHADIWVKSYSLYSRERYICNSGFKRKAGTSSLTECVLNKATNVAH
WTTPSLKCIRDPALVHQRPAPPS
Fc-b-GPLGLAGRSANAGS-IL-15(S162A)-(GGS)5-IL-15Rα
>P1336_Fc-b-PS3-L15R-S162A chains 1 and 2
(SEQ ID NO: 98)
EPKSSDKTHTCPPCPAPEAAGGPSVFLFPPKPKDTLYITREPEVTCV
VVDVSHEDPEVKFNWYVDGVEVHNAKTKPREEQYNSTYRVVSVLTVL
HQDWLNGKEYKCKVSNKALAAPIEKTISKAKGQPREPQVYTLPPSRE
EMTKNQVSLTCLVKGFYPSDIAVEWESNGQPENNYKTTPPVLDSDGS
FFLYSKLTVDKSRWQQGNVFSCSVMHEALHNHYTQKSLSLSPGK [symbol] [symbol]
NWVNVISDLKKIEDLIQSMHIDATLYTESDVHP
SCKVTAMKCFLLELQVISLESGDASIHDTVENLIILANNSLSSNGNV
TESGCKECEELEEKNIKEFLQSFVHIVQMFINTA [symbol] [symbol]
ITCPPPMSVEHADIWVKSYSLYSRERYICNSGFKRKAGTSSLTEC
VLNKATNVAHWTTPSLKCIRDPALVHQRPAPPS

[0341] Expected Cleavage Products from uPA or Matriptase Cleavage of P1336:

1) Fc-b-GPLGLAGR homodimer (product from
complete cleavage)
Chains 1 and 2
(SEQ ID NO: 99)
EPKSSDKTHTCPPCPAPEAAGGPSVFLFPPKPKDTLYITREPEVTCV
VVDVSHEDPEVKFNWYVDGVEVHNAKTKPREEQYNSTYRVVSVLTVL
HQDWLNGKEYKCKVSNKALAAPIEKTISKAKGQPREPQVYTLPPSRE
EMTKNQVSLTCLVKGFYPSDIAVEWESNGQPENNYKTTPPVLDSDGS
FFLYSKLTVDKSRWQQGNVFSCSVMHEALHNHYTQKSLSLSPGK

[symbol]

2) SANAGS-IL-15-(GGS)5-IL-15Rα homodimer
(product from complete cleavage, active)
Chains 1 and 2
(SEQ ID NO: 100) [symbol]
NWVNVISDLKKIEDLIQSMHIDATLYTESDVHPSCKVTAMK
CFLLELQVISLESGDASIHDTVENLIILANNSLSSNGNVTESGCKECEEL
EEKNIKEFLQSFVHIVQMFINTA [symbol] [symbol] ITCPPP
MSVEHADIWVKSYSLYSRERYICNSGFKRKAGTSSLTECVLNKATNV
AHWTTPSLKCIRDPALVHQRPAPPS
3) Fc-b-GPLGLAGRSANAGS-IL-15(S162A)-(GGS)5-IL-
15Rα/Fc-b-GPLGLAGR/SANAGS-IL-15-(GGS)5-IL-15Rα
(product from partial cleavage, active)
Chain 1: Fc-b-GPLGLAGRSANAGS-IL-15(S162A)-
(GGS)5-IL-15Rα
(SEQ ID NO: 101)
EPKSSDKTHTCPPCPAPEAAGGPSVFLFPPKPKDTLYITREPEVTCV
VVDVSHEDPEVKFNWYVDGVEVHNAKTKPREEQYNSTYRVVSVLTVL
HQDWLNGKEYKCKVSNKALAAPIEKTISKAKGQPREPQVYTLPPSRE
EMTKNQVSLTCLVKGFYPSDIAVEWESNGQPENNYKTTPPVLDSDGSFFL
YSKLTVDKSRWQQGNVFSCSVMHEALHNHYTQKSLSLSPGK [symbol] [symbol]
NWVNVISDLKKIEDLIQSMHIDATLYTESDVHP
SCKVTAMKCFLLELQVISLESGDASIHDTVENLIILANNSLSSNGNV
TESGCKECEELEEKNIKEFLQSFVHIVQMFINTA [symbol] [symbol]
ITCPPPMSVEHADIWVKSYSLYSRERYIC
NSGFKRKAGTSSLTECVLNKATNVAHWTTPSLKCIRDPALVHQRPAPPS
Chain 2: Fc-b-GPLGLAGR
(SEQ ID NO: 102)
EPKSSDKTHTCPPCPAPEAAGGPSVFLFPPKPKDTLYITREPEVTCV
VVDVSHEDPEVKFNWYVDGVEVHNAKTKPREEQYNSTYRVVSVLTVL
HQDWLNGKEYKCKVSNKALAAPIEKTISKAKGQPREPQVYTLPPSRE
EMTKNQVSLTCLVKGFYPSDIAVEWESNGQPENNYKTTPPVLDSDGS
FFLYSKLTVDKSRWQQGNVFSCSVMHEALHNHYTQKSLSLSPGK

[symbol]

Chain 3: SANAGS-IL-15-(GGS)5-IL-15Rα
(SEQ ID NO: 103) [symbol]
NWVNVISDLKKIEDLIQSMHIDATLYTESDVHPSCKVTAMK
CFLLELQVISLESGDASIHDTVENLIILANNSLSSNGNVTESGCKECEEL
EEKNIKEFLQSFVHIVQMFINTA [symbol] [symbol] ITCPPP
MSVEHADIWVKSYSLYSRERYICNSGFKRKAGTSSLTECVLNKATNV
AHWTTPSLKCIRDPALVHQRPAPPS

[0342] Expected Cleavage Products from Legumain Cleavage of P1336:

1) Fc-b-GPLGLAGRSAN homodimer (product from
complete cleavage)
Chains 1 and 2
(SEQ ID NO: 104)
EPKSSDKTHTCPPCPAPEAAGGPSVFLFPPKPKDTLYITREPEVTCV
VVDVSHEDPEVKFNWYVDGVEVHNAKTKPREEQYNSTYRVVSVLTVL
HQDWLNGKEYKCKVSNKALAAPIEKTISKAKGQPREPQVYTLPPSRE
EMTKNQVSLTCLVKGFYPSDIAVEWESNGQPENNYKTTPPVLDSDGS
FFLYSKLTVDKSRWQQGNVFSCSVMHEALHNHYTQKSLSLSPGK

[symbol]

2) AGS-IL-15-(GGS)5-IL-15Rα homodimer (product
from complete cleavage, active)
Chains 1 and 2
(SEQ ID NO: 105) [symbol]
NWVNVISDLKKIEDLIQSMHIDATLYTESDVHPSCKVTAMKCFL
LELQVISLESGDASIHDTVENLIILANNSLSSNGNVTESGCKECEEL
EEKNIKEFLQSFVHIVQMFINTA [symbol] [symbol] ITCPPPMSV
EHADIWVKSYSLYSRERYICNSGFKRKAGTSSLTECVLNKATNVAHW
TTPSLKCIRDPALVHQRPAPPS
3) Fc-b-GPLGLAGRSANAGS-IL-15(S162A)-(GGS)5-IL-
15Rα/Fc-b-GPLGLAGRSAN/AGS-IL-15-(GGS)5-IL-15Rα
(product from partial cleavage, active)
Chain 1: Fc-b-GPLGLAGRSANAGS-IL-15(S162A)-
(GGS)5-IL-15Rα
(SEQ ID NO: 106)
EPKSSDKTHTCPPCPAPEAAGGPSVFLFPPKPKDTLYITREPEVTCV
VVDVSHEDPEVKFNWYVDGVEVHNAKTKPREEQYNSTYRVVSVLTVL
HQDWLNGKEYKCKVSNKALAAPIEKTISKAKGQPREPQVYTLPPSRE
EMTKNQVSLTCLVKGFYPSDIAVEWESNGQPENNYKTTPPVLDSDGS
FFLYSKLTVDKSRWQQGNVFSCSVMHEALHNHYTQKSLSLSPGK [symbol] [symbol]
NWVNVISDLKKIEDLIQSMHIDATLYTESDVHP
SCKVTAMKCFLLELQVISLESGDASIHDTVENLIILANNSLSSNGNVTE
SGCKECEELEEKNIKEFLQSFVHIVQMFINTA [symbol] [symbol]
ITCPPPMSVEHADIWVKSYSLYSRERYICNSGFKRKAGTSSLTECVL
NKATNVAHWTTPSLKCIRDPALVHQRPAPPS
Chain 2: Fc-b-GPLGLAGRSAN
(SEQ ID NO: 107)
EPKSSDKTHTCPPCPAPEAAGGPSVFLFPPKPKDTLYITREPEVTCV
VVDVSHEDPEVKFNWYVDGVEVHNAKTKPREEQYNSTYRVVSVLTVL
HQDWLNGKEYKCKVSNKALAAPIEKTISKAKGQPREPQVYTLPPSRE
EMTKNQVSLTCLVKGFYPSDIAVEWESNGQPENNYKTTPPVLDSDGS
FFLYSKLTVDKSRWQQGNVFSCSVMHEALHNHYTQKSLSLSPGK

[symbol]

Chain 3: AGS-IL-15-(GGS)5-IL-15Rα
(SEQ ID NO: 108) [symbol]
NWVNVISDLKKIEDLIQSMHIDATLYTESDVHPSCKVTAMKCFL
LELQVISLESGDASIHDTVENLIILANNSLSSNGNVTESGCKECEEL
EEKNIKEFLQSFVHIVQMFINTA [symbol] [symbol] ITCPPPMS
VEHADIWVKSYSLYSRERYICNSGFKRKAGTSSLTECVLNKATNVAH
WTTPSLKCIRDPALVHQRPAPPS

[0343] Expected Cleavage Products from MMP-2 or MMP-9 Cleavage of P1336:

1) Fc-b-GPLG homodimer (product from complete
cleavage)
Chains 1 and 2
(SEQ ID NO: 109)
EPKSSDKTHTCPPCPAPEAAGGPSVFLFPPKPKDTLYITREPEVTCV
VVDVSHEDPEVKFNWYVDGVEVHNAKTKPREEQYNSTYRVVSVLTVL
HQDWLNGKEYKCKVSNKALAAPIEKTISKAKGQPREPQVYTLPPSRE
EMTKNQVSLTCLVKGFYPSDIAVEWESNGQPENNYKTTPPVLDSDGS
FFLYSKLTVDKSRWQQGNVFSCSVMHEALHNHYTQKSLSLSPGK [symbol]
2) LAGRSANAGS-IL-15-(GGS)5-IL-15Rα homodimer
(product from complete cleavage, active)
Chains 1 and 2
(SEQ ID NO: 110) [symbol]
NWVNVISDLKKIEDLIQSMHIDATLYTESDVHPSCKV
TAMKCFLLELQVISLESGDASIHDTVENLIILANNSLSSNGNVTESG
CKECEELEEKNIKEFLQSFVHIVQMFINTA [symbol] [symbol] IT
CPPPMSVEHADIWVKSYSLYSRERYICNSGFKRKAGTSSLTECVLNK
ATNVAHWTTPSLKCIRDPALVHQRPAPPS
3) Fc-b-GPLGLAGRSANAGS-IL-15(S162A)-(GGS)5-IL-
15Rα/Fc-b-GPLG/LAGRSANAGS-IL-15-(GGS)5-IL-15Rα
(product from partial cleavage, active)
Chain 1: Fc-b-GPLGLAGRSANAGS-IL-15(S162A)-
(GGS)5-IL-15Rα
(SEQ ID NO: 111)
EPKSSDKTHTCPPCPAPEAAGGPSVFLFPPKPKDTLYITREPEVTCV
VVDVSHEDPEVKFNWYVDGVEVHNAKTKPREEQYNSTYRVVSVLTVL
HQDWLNGKEYKCKVSNKALAAPIEKTISKAKGQPREPQVYTLPPSRE
EMTKNQVSLTCLVKGFYPSDIAVEWESNGQPENNYKTTPPVLDSDGSFFL
YSKLTVDKSRWQQGNVFSCSVMHEALHNHYTQKSLSLSPGK [symbol] [symbol]
NWVNVISDLKKIEDLIQSMHIDATLYTESDVHP
SCKVTAMKCFLLELQVISLESGDASIHDTVENLIILANNSLSSNGNV
TESGCKECEELEEKNIKEFLQSFVHIVQMFINTAGGSGGSGGSGGSG
GSITCPPPMSVEHADIWVKSYSLYSRERYICNSGFKRKAGTSSLTEC
VLNKATNVAHWTTPSLKCIRDPALVHQRPAPPS
Chain 2: Fc-b-GPLG
(SEQ ID NO: 112)
EPKSSDKTHTCPPCPAPEAAGGPSVFLFPPKPKDTLYITREPEVTCV
VVDVSHEDPEVKFNWYVDGVEVHNAKTKPREEQYNSTYRVVSVLTVL
HQDWLNGKEYKCKVSNKALAAPIEKTISKAKGQPREPQVYTLPPSRE
EMTKNQVSLTCLVKGFYPSDIAVEWESNGQPENNYKTTPPVLDSDGS
FFLYSKLTVDKSRWQQGNVFSCSVMHEALHNHYTQKSLSLSPGK [symbol]
Chain 3: LAGRSANAGS-IL-15-(GGS)5-IL-15Rα
(SEQ ID NO: 113) [symbol]
NWVNVISDLKKIEDLIQSMHIDATLYTESDVHPSCKV
TAMKCFLLELQVISLESGDASIHDTVENLIILANNSLSSNGNVTESGCKE
CEELEEKNIKEFLQSFVHIVQMFINTA [symbol] [symbol]
ITCPPPMSVEHADIWVKSYSLYSRERYICNSGFKRKAGTSSLTECVLNK
ATNVAHWTTPSLKCIRDPALVHQRPAPPS
Fc-b-PLGLSGRSANAGPA-IL-15(S162A)-(GGS)5-IL-15Rα
>P1337_Fc-b-PS4-L15R-S162A chains 1 and 2
(SEQ ID NO: 114)
EPKSSDKTHTCPPCPAPEAAGGPSVFLFPPKPKDTLYITREPEVTCV
VVDVSHEDPEVKFNWYVDGVEVHNAKTKPREEQYNSTYRVVSVLTVL
HQDWLNGKEYKCKVSNKALAAPIEKTISKAKGQPREPQVYTLPPSRE
EMTKNQVSLTCLVKGFYPSDIAVEWESNGQPENNYKTTPPVLDSDGS
FFLYSKLTVDKSRWQQGNVFSCSVMHEALHNHYTQKSLSLSPGK [symbol]
NWVNVISDLKKIEDLIQSMHIDATLYTESDV
HPSCKVTAMKCFLLELQVISLESGDASIHDTVENLIILANNSLSSNGNV
TESGCKECEELEEKNIKEFLQSFVHIVQMFINTA [symbol] [symbol]
ITCPPPMSVEHADIWVKSYSLYSRERYICNSGFKRKA
GTSSLTECVLNKATNVAHWTTPSLKCIRDPALVHQRPAPPS

[0344] Expected Cleavage Products from uPA or Matriptase Cleavage of P1337:

1) Fc-b-PLGLSGR homodimer (product from
complete cleavage)
Chains 1 and 2
(SEQ ID NO: 115)
EPKSSDKTHTCPPCPAPEAAGGPSVFLFPPKPKDTLYITREPEVTCV
VVDVSHEDPEVKFNWYVDGVEVHNAKTKPREEQYNSTYRVVSVLTVL
HQDWLNGKEYKCKVSNKALAAPIEKTISKAKGQPREPQVYTLPPSRE
EMTKNQVSLTCLVKGFYPSDIAVEWESNGQPENNYKTTPPVLDSDGS
FFLYSKLTVDKSRWQQGNVFSCSVMHEALHNHYTQKSLSLSPGK

[symbol]

2) SANAGPA-IL-15-(GGS)5-IL-15Rα homodimer
(product from complete cleavage, active)
Chains 1 and 2
(SEQ ID NO: 116) [symbol]
NWVNVISDLKKIEDLIQSMHIDATLYTESDVHPSCKVTAM
KCFLLELQVISLESGDASIHDTVENLIILANNSLSSNGNVTESGCKE
CEELEEKNIKEFLQSFVHIVQMFINTA [symbol] [symbol] ITCPP
PMSVEHADIWVKSYSLYSRERYICNSGFKRKAGTSSLTECVLNKATN
VAHWTTPSLKCIRDPALVHQRPAPPS
3) Fc-b-PLGLSGRSANAGPA-IL-15(S162A)-(GGS)5-IL-
15Rα/Fc-b-PLGLSGR/SANAGPA-IL-15-(GGS)5-IL-15Rα
(product from partial cleavage, active)
Chain 1: Fc-b-PLGLSGRSANAGPA-IL-15(S162A)-
(GGS)5-IL-15Rα
(SEQ ID NO: 117)
EPKSSDKTHTCPPCPAPEAAGGPSVFLFPPKPKDTLYITREPEVTCV
VVDVSHEDPEVKFNWYVDGVEVHNAKTKPREEQYNSTYRVVSVLTVL
HQDWLNGKEYKCKVSNKALAAPIEKTISKAKGQPREPQVYTLPPSRE
EMTKNQVSLTCLVKGFYPSDIAVEWESNGQPENNYKTTPPVLDSDGS
FFLYSKLTVDKSRWQQGNVFSCSVMHEALHNHYTQKSLSLSPGK [symbol] [symbol]
NWVNVISDLKKIEDLIQSMHIDATLYTESDVHP
SCKVTAMKCFLLELQVISLESGDASIHDTVENLIILANNSLSSNGNVTE
SGCKECEELEEKNIKEFLQSFVHIVQMFINTA [symbol] [symbol]
ITCPPPMSVEHADIWVKSYSLYSRERYICNSGFKRKAGTSSLTEC
VLNKATNVAHWTTPSLKCIRDPALVHQRPAPPS
Chain 2: Fc-b-PLGLSGR
(SEQ ID NO: 118)
EPKSSDKTHTCPPCPAPEAAGGPSVFLFPPKPKDTLYITREPEVTCV
VVDVSHEDPEVKFNWYVDGVEVHNAKTKPREEQYNSTYRVVSVLTVL
HQDWLNGKEYKCKVSNKALAAPIEKTISKAKGQPREPQVYTLPPSRE
EMTKNQVSLTCLVKGFYPSDIAVEWESNGQPENNYKTTPPVLDSDGS
FFLYSKLTVDKSRWQQGNVFSCSVMHEALHNHYTQKSLSLSPGK

[symbol]

Chain 3: SANAGPA-IL-15-(GGS)5-IL-15Rα
(SEQ ID NO: 119) [symbol]
NWVNVISDLKKIEDLIQSMHIDATLYTESDVHPSCKVTAM
KCFLLELQVISLESGDASIHDTVENLIILANNSLSSNGNVTESGCKE
CEELEEKNIKEFLQSFVHIVQMFINTA [symbol] [symbol] ITCPP
PMSVEHADIWVKSYSLYSRERYICNSGFKRKAGTSSLTECVLNKATN
VAHWTTPSLKCIRDPALVHQRPAPPS

[0345] Expected Cleavage Products from Legumain Cleavage of P1337:

1) Fc-b-PLGLSGRSAN homodimer (product from complete cleavage)
Chains 1 and 2
(SEQ ID NO: 120)
EPKSSDKTHTCPPCPAPEAAGGPSVFLFPPKPKDTLYITREPEVTCVVVDVSHEDPEVKFNWY
VDGVEVHNAKTKPREEQYNSTYRVVSVLTVLHQDWLNGKEYKCKVSNKALAAPIEKTISKAKGQPREPQVYTLPP
SREEMTKNQVSLTCLVKGFYPSDIAVEWESNGQPENNYKTTPPVLDSDGSFFLYSKLTVDKSRWQQGNVFSCSVM
HEALHNHYTQKSLSLSPGK [symbol]
2) AGPA-IL-15-(GGS)5-IL-15Rα homodimer(product from complete
cleavage, active)
Chains 1 and 2
(SEQ ID NO: 121) [symbol]
NWVNVISDLKKIEDLIQSMHIDATLYTESDVHPSCKVTAMKCFLLELQVISLESGDASI
HDTVENLIILANNSLSSNGNVTESGCKECEELEEKNIKEFLQSFVHIVQMFINTA [symbol] [symbol] ITCPP
PMSVEHADIWVKSYSLYSRERYICNSGFKRKAGTSSLTECVLNKATNVAHWTTPSLKCIRDPALVHQRPAPPS
3) Fc-b-PLGLSGRSANAGPA-IL-15(S162A)-(GGS)5-IL-15Rα/Fc-b-
PLGLSGRSAN/AGPA-IL-15-(GGS)5-IL-15Rα (product from partial cleavage,
active)
Chain 1: Fc-b-PLGLSGRSANAGPA-IL-15(S162A)-(GGS)5-IL-15Rα
(SEQ ID NO: 122)
EPKSSDKTHTCPPCPAPEAAGGPSVFLFPPKPKDTLYITREPEVTCVVVDVSHEDPEVKFNWY
VDGVEVHNAKTKPREEQYNSTYRVVSVLTVLHQDWLNGKEYKCKVSNKALAAPIEKTISKAKGQPREPQVYTLPP
SREEMTKNQVSLTCLVKGFYPSDIAVEWESNGQPENNYKTTPPVLDSDGSFFLYSKLTVDKSRWQQGNVFSCSVM
HEALHNHYTQKSLSLSPGK [symbol] [symbol] NWVNVISDLKKIEDLIQSMHIDATLYTESDVHPSCKVTAMKC
FLLELQVISLESGDASIHDTVENLIILANNSLSSNGNVTESGCKECEELEEKNIKEFLQSFVHIVQMFINTA [symbol] [symbol]
ITCPPPMSVEHADIWVKSYSLYSRERYICNSGFKRKAGTSSLTECVLNKATNVAHWTTPSLKC
IRDPALVHQRPAPPS
Chain 2: Fc-b-PLGLSGRSAN
(SEQ ID NO: 123)
EPKSSDKTHTCPPCPAPEAAGGPSVFLFPPKPKDTLYITREPEVTCVVVDVSHEDPEVKFNWY
VDGVEVHNAKTKPREEQYNSTYRVVSVLTVLHQDWLNGKEYKCKVSNKALAAPIEKTISKAKGQPREPQVYTLPP
SREEMTKNQVSLTCLVKGFYPSDIAVEWESNGQPENNYKTTPPVLDSDGSFFLYSKLTVDKSRWQQGNVFSCSVM
HEALHNHYTQKSLSLSPGK [symbol]
Chain 3: AGPA-IL-15-(GGS)5-IL-15Rα
(SEQ ID NO: 124) [symbol]
NWVNVISDLKKIEDLIQSMHIDATLYTESDVHPSCKVTAMKCFLLELQVISLESGDASI
HDTVENLIILANNSLSSNGNVTESGCKECEELEEKNIKEFLQSFVHIVQMFINTA [symbol] [symbol] ITCPP
PMSVEHADIWVKSYSLYSRERYICNSGFKRKAGTSSLTECVLNKATNVAHWTTPSLKCIRDPALVHQRPAPPS

[0346] Expected Cleavage Products from MMP-2 or MMP-9 Cleavage of P1337:

1) Fc-b-PLG homodimer (product from complete cleavage)
Chains 1 and 2
(SEQ ID NO: 125)
EPKSSDKTHTCPPCPAPEAAGGPSVFLFPPKPKDTLYITREPEVTCVVVDVSHEDPEVKFNWY
VDGVEVHNAKTKPREEQYNSTYRVVSVLTVLHQDWLNGKEYKCKVSNKALAAPIEKTISKAKGQPREPQVYTLPP
SREEMTKNQVSLTCLVKGFYPSDIAVEWESNGQPENNYKTTPPVLDSDGSFFLYSKLTVDKSRWQQGNVFSCSVM
HEALHNHYTQKSLSLSPGK [symbol]
2) LSGRSANAGPA-IL-15-(GGS)5-IL-15Rα homodimer(product from
complete cleavage, active)
Chains 1 and 2
(SEQ ID NO: 126) [symbol]
NWVNVISDLKKIEDLIQSMHIDATLYTESDVHPSCKVTAMKCFLLELQVISL
ESGDASIHDTVENLIILANNSLSSNGNVTESGCKECEELEEKNIKEFLQSFVHIVQMFINTA [symbol] [symbol] [symbol]
ITCPPPMSVEHADIWVKSYSLYSRERYICNSGFKRKAGTSSLTECVLNKATNVAHWTTPSLKCIRDPALVHQR
PAPPS
3) Fc-b-PLGLSGRSANAGPA-IL-15(S162A)-(GGS)5-IL-15Rα/Fc-b-PLG/
LSGRSANAGPA-IL-15-(GGS)5-IL-15Rα (product from partial cleavage, active)
Chain 1: Fc-b-PLGLSGRSANAGPA-IL-15(S162A)-(GGS)5-IL-15Rα
(SEQ ID NO: 127)
EPKSSDKTHTCPPCPAPEAAGGPSVFLFPPKPKDTLYITREPEVTCVVVDVSHEDPEVKFNWY
VDGVEVHNAKTKPREEQYNSTYRVVSVLTVLHQDWLNGKEYKCKVSNKALAAPIEKTISKAKGQPREPQVYTLPP
SREEMTKNQVSLTCLVKGFYPSDIAVEWESNGQPENNYKTTPPVLDSDGSFFLYSKLTVDKSRWQQGNVFSCSVM
HEALHNHYTQKSLSLSPGK [symbol] [symbol] NWVNVISDLKKIEDLIQSMHIDATLYTESDVHPSCKVTAMKC
FLLELQVISLESGDASIHDTVENLIILANNSLSSNGNVTESGCKECEELEEKNIKEFLQSFVHIVQMFINTA [symbol] [symbol]
ITCPPPMSVEHADIWVKSYSLYSRERYICNSGFKRKAGTSSLTECVLNKATNVAHWTTPSLKC
IRDPALVHQRPAPPS
Chain 2: Fc-b-PLG
(SEQ ID NO: 128)
EPKSSDKTHTCPPCPAPEAAGGPSVFLFPPKPKDTLYITREPEVTCVVVDVSHEDPEVKFNWY
VDGVEVHNAKTKPREEQYNSTYRVVSVLTVLHQDWLNGKEYKCKVSNKALAAPIEKTISKAKGQPREPQVYTLPP
SREEMTKNQVSLTCLVKGFYPSDIAVEWESNGQPENNYKTTPPVLDSDGSFFLYSKLTVDKSRWQQGNVFSCSVM
HEALHNHYTQKSLSLSPGK [symbol]
Chain 3: LSGRSANAGPA-IL-15-(GGS)5-IL-15Rα
(SEQ ID NO: 129) [symbol]
NWVNVISDLKKIEDLIQSMHIDATLYTESDVHPSCKVTAMKCFLLELQVISL
ESGDASIHDTVENLIILANNSLSSNGNVTESGCKECEELEEKNIKEFLQSFVHIVQMFINTA [symbol] [symbol] [symbol]
ITCPPPMSVEHADIWVKSYSLYSRERYICNSGFKRKAGTSSLTECVLNKATNVAHWTTPSLKCIRDPALVHQR
PAPPS
Fc-b-PLGLAGRSANAGPA-IL-15(S162A)-(GGS)5-IL-15Rα
>P1338_Fc-b-PS5-L15R-S162A chains 1 and 2
(SEQ ID NO: 130)
EPKSSDKTHTCPPCPAPEAAGGPSVFLFPPKPKDTLYITREPEVTCVVVDVSHEDPEVKFNWYVDGVEVHNAKTK
PREEQYNSTYRVVSVLTVLHQDWLNGKEYKCKVSNKALAAPIEKTISKAKGQPREPQVYTLPPSREEMTKNQVSL
TCLVKGFYPSDIAVEWESNGQPENNYKTTPPVLDSDGSFFLYSKLTVDKSRWQQGNVFSCSVMHEALHNHYTQKS
LSLSPGK [symbol] [symbol] NWVNVISDLKKIEDLIQSMHIDATLYTESDVHPSCKVTAMKCFLLELQVISLES
GDASIHDTVENLIILANNSLSSNGNVTESGCKECEELEEKNIKEFLQSFVHIVQMFINTA [symbol] [symbol]
ITCPPPMSVEHADIWVKSYSLYSRERYICNSGFKRKAGTSSLTECVLNKATNVAHWTTPSLKCIRDPALVHQRPA
PPS

[0347] Expected Cleavage Products from uPA or Matriptase Cleavage of P1338:

1) Fc-b-PLGLAGR homodimer (product from complete cleavage)
Chains 1 and 2
(SEQ ID NO: 131)
EPKSSDKTHTCPPCPAPEAAGGPSVFLFPPKPKDTLYITREPEVTCVVVDVSHEDPEVKFNWY
VDGVEVHNAKTKPREEQYNSTYRVVSVLTVLHQDWLNGKEYKCKVSNKALAAPIEKTISKAKGQPREPQVYTLPP
SREEMTKNQVSLTCLVKGFYPSDIAVEWESNGQPENNYKTTPPVLDSDGSFFLYSKLTVDKSRWQQGNVFSCSVM
HEALHNHYTQKSLSLSPGK [symbol]
2) SANAGPA-IL-15-(GGS)5-IL-15Rα homodimer (product from complete
cleavage, active)
Chains 1 and 2
(SEQ ID NO: 132) [symbol]
NWVNVISDLKKIEDLIQSMHIDATLYTESDVHPSCKVTAMKCFLLELQVISLESGD
ASIHDTVENLIILANNSLSSNGNVTESGCKECEELEEKNIKEFLQSFVHIVQMFINTA [symbol] [symbol] IT
CPPPMSVEHADIWVKSYSLYSRERYICNSGFKRKAGTSSLTECVLNKATNVAHWTTPSLKCIRDPALVHQRPAPP
S
3) Fc-b-PLGLAGRSANAGPA-IL-15(S162A)-(GGS)5-IL-15Rα/Fc-b-PLGLAGR/
SANAGPA-IL-15-(GGS)5-IL-15Rα (product from partial cleavage, active)
Chain 1: Fc-b-PLGLAGRSANAGPA-IL-15(S162A)-(GGS)5-IL-15Rα
(SEQ ID NO: 133)
EPKSSDKTHTCPPCPAPEAAGGPSVFLFPPKPKDTLYITREPEVTCVVVDVSHEDPEVKFNWY
VDGVEVHNAKTKPREEQYNSTYRVVSVLTVLHQDWLNGKEYKCKVSNKALAAPIEKTISKAKGQPREPQVYTLPP
SREEMTKNQVSLTCLVKGFYPSDIAVEWESNGQPENNYKTTPPVLDSDGSFFLYSKLTVDKSRWQQGNVFSCSVM
HEALHNHYTQKSLSLSPGK [symbol] [symbol] NWVNVISDLKKIEDLIQSMHIDATLYTESDVHPSCKVTAMKC
FLLELQVISLESGDASIHDTVENLIILANNSLSSNGNVTESGCKECEELEEKNIKEFLQSFVHIVQMFINTA [symbol] [symbol]
ITCPPPMSVEHADIWVKSYSLYSRERYICNSGFKRKAGTSSLTECVLNKATNVAHWTTPSLKC
IRDPALVHQRPAPPS
Chain 2: Fc-b-PLGLAGR
(SEQ ID NO: 134)
EPKSSDKTHTCPPCPAPEAAGGPSVFLFPPKPKDTLYITREPEVTCVVVDVSHEDPEVKFNWY
VDGVEVHNAKTKPREEQYNSTYRVVSVLTVLHQDWLNGKEYKCKVSNKALAAPIEKTISKAKGQPREPQVYTLPP
SREEMTKNQVSLTCLVKGFYPSDIAVEWESNGQPENNYKTTPPVLDSDGSFFLYSKLTVDKSRWQQGNVFSCSVM
HEALHNHYTQKSLSLSPGK [symbol]
Chain 3: SANAGPA-IL-15-(GGS)5-IL-15Rα
(SEQ ID NO: 135) [symbol]
NWVNVISDLKKIEDLIQSMHIDATLYTESDVHPSCKVTAMKCFLLELQVISLESGD
ASIHDTVENLIILANNSLSSNGNVTESGCKECEELEEKNIKEFLQSFVHIVQMFINTA [symbol] [symbol] IT
CPPPMSVEHADIWVKSYSLYSRERYICNSGFKRKAGTSSLTECVLNKATNVAHWTTPSLKCIRDPALVHQRPAPP
S

[0348] Expected Cleavage Products from Legumain Cleavage of P1338:

1) Fc-b-PLGLAGRSAN homodimer (product from complete cleavage)
Chains 1 and 2
(SEQ ID NO: 136)
EPKSSDKTHTCPPCPAPEAAGGPSVFLFPPKPKDTLYITREPEVTCVVVDVSHEDPEVKFNWY
VDGVEVHNAKTKPREEQYNSTYRVVSVLTVLHQDWLNGKEYKCKVSNKALAAPIEKTISKAKGQPREPQVYTLPP
SREEMTKNQVSLTCLVKGFYPSDIAVEWESNGQPENNYKTTPPVLDSDGSFFLYSKLTVDKSRWQQGNVFSCSVM
HEALHNHYTQKSLSLSPGK [symbol]
2) AGPA-IL-15-(GGS)5-IL-15Rα homodimer (product from complete
cleavage, active)
Chains 1 and 2
(SEQ ID NO: 137) [symbol]
NWVNVISDLKKIEDLIQSMHIDATLYTESDVHPSCKVTAMKCFLLELQVISLESGDASI
HDTVENLIILANNSLSSNGNVTESGCKECEELEEKNIKEFLQSFVHIVQMFINT [symbol] [symbol] ITCPP
PMSVEHADIWVKSYSLYSRERYICNSGFKRKAGTSSLTECVLNKATNVAHWTTPSLKCIRDPALVHQRPAPPS
3) Fc-b-PLGLAGRSANAGPA-IL-15(S162A)-(GGS)5-IL-15Rα/Fc-b-PLGLAGRSAN/
AGPA-IL-15-(GGS)5-IL-15Rα (product from partial cleavage, active)
Chain 1: Fc-b-PLGLAGRSANAGPA-IL-15(S162A)-(GGS)5-IL-15Rα
(SEQ ID NO: 138)
EPKSSDKTHTCPPCPAPEAAGGPSVFLFPPKPKDTLYITREPEVTCVVVDVSHEDPEVKFNWY
VDGVEVHNAKTKPREEQYNSTYRVVSVLTVLHQDWLNGKEYKCKVSNKALAAPIEKTISKAKGQPREPQVYTLPP
SREEMTKNQVSLTCLVKGFYPSDIAVEWESNGQPENNYKTTPPVLDSDGSFFLYSKLTVDKSRWQQGNVFSCSVM
HEALHNHYTQKSLSLSPGK [symbol] [symbol] NWVNVISDLKKIEDLIQSMHIDATLYTESDVHPSCKVTAMKC
FLLELQVISLESGDASIHDTVENLIILANNSLSSNGNVTESGCKECEELEEKNIKEFLQSFVHIVQMFINT [symbol] [symbol]
ITCPPPMSVEHADIWVKSYSLYSRERYICNSGFKRKAGTSSLTECVLNKATNVAHWTTPSLKC
IRDPALVHQRPAPPS
Chain 2: Fc-b-PLGLAGRSAN
(SEQ ID NO: 139)
EPKSSDKTHTCPPCPAPEAAGGPSVFLFPPKPKDTLYITREPEVTCVVVDVSHEDPEVKFNWY
VDGVEVHNAKTKPREEQYNSTYRVVSVLTVLHQDWLNGKEYKCKVSNKALAAPIEKTISKAKGQPREPQVYTLPP
SREEMTKNQVSLTCLVKGFYPSDIAVEWESNGQPENNYKTTPPVLDSDGSFFLYSKLTVDKSRWQQGNVFSCSVM
HEALHNHYTQKSLSLSPGK [symbol]
Chain 3: AGPA-IL-15-(GGS)5-IL-15Rα
(SEQ ID NO: 140) [symbol]
NWVNVISDLKKIEDLIQSMHIDATLYTESDVHPSCKVTAMKCFLLELQVISLESGDASI
HDTVENLIILANNSLSSNGNVTESGCKECEELEEKNIKEFLQSFVHIVQMFINT [symbol] [symbol] ITCPP
PMSVEHADIWVKSYSLYSRERYICNSGFKRKAGTSSLTECVLNKATNVAHWTTPSLKCIRDPALVHQRPAPPS

[0349] Expected Cleavage Products from MMP-2 or MMP-9 Cleavage of P1338:

1) Fc-b-PLG homodimer (product from complete cleavage)
Chains 1 and 2
(SEQ ID NO: 141)
EPKSSDKTHTCPPCPAPEAAGGPSVFLFPPKPKDTLYITREPEVTCVVVDVSHEDPEVKFNWY
VDGVEVHNAKTKPREEQYNSTYRVVSVLTVLHQDWLNGKEYKCKVSNKALAAPIEKTISKAKGQPREPQVYTLPP
SREEMTKNQVSLTCLVKGFYPSDIAVEWESNGQPENNYKTTPPVLDSDGSFFLYSKLTVDKSRWQQGNVFSCSVM
HEALHNHYTQKSLSLSPGK [symbol]
2) LAGRSANAGPA-IL-15-(GGS)5-IL-15Rα homodimer (product from
complete cleavage, active)
Chains 1 and 2
(SEQ ID NO: 142) [symbol]
NWVNVISDLKKIEDLIQSMHIDATLYTESDVHPSCKVTAMKCFLLELQVISL
ESGDASIHDTVENLIILANNSLSSNGNVTESGCKECEELEEKNIKEFLQSFVHIVQMFINTA [symbol] [symbol] [symbol]
ITCPPPMSVEHADIWVKSYSLYSRERYICNSGFKRKAGTSSLTECVLNKATNVAHWTTPSLKCIRDPALVHQR
PAPPS
3) Fc-b-PLGLAGRSANAGPA-IL-15(S162A)-(GGS)5-IL-15Rα/Fc-b-PLG/
LAGRSANAGPA-IL-15-(GGS)5-IL-15Rα (product from partial cleavage, active)
Chain 1: Fc-b-PLGLAGRSANAGPA-IL-15(S162A)-(GGS)5-IL-15Rα
(SEQ ID NO: 143)
EPKSSDKTHTCPPCPAPEAAGGPSVFLFPPKPKDTLYITREPEVTCVVVDVSHEDPEVKFNWY
VDGVEVHNAKTKPREEQYNSTYRVVSVLTVLHQDWLNGKEYKCKVSNKALAAPIEKTISKAKGQPREPQVYTLPP
SREEMTKNQVSLTCLVKGFYPSDIAVEWESNGQPENNYKTTPPVLDSDGSFFLYSKLTVDKSRWQQGNVFSCSVM
HEALHNHYTQKSLSLSPGK [symbol] [symbol] NWVNVISDLKKIEDLIQSMHIDATLYTESDVHPSCKVTAMKC
FLLELQVISLESGDASIHDTVENLIILANNSLSSNGNVTESGCKECEELEEKNIKEFLQSFVHIVQMFINTA [symbol] [symbol]
ITCPPPMSVEHADIWVKSYSLYSRERYICNSGFKRKAGTSSLTECVLNKATNVAHWTTPSLKC
IRDPALVHQRPAPPS
Chain 2: Fc-b-PLG
(SEQ ID NO: 144)
EPKSSDKTHTCPPCPAPEAAGGPSVFLFPPKPKDTLYITREPEVTCVVVDVSHEDPEVKFNWY
VDGVEVHNAKTKPREEQYNSTYRVVSVLTVLHQDWLNGKEYKCKVSNKALAAPIEKTISKAKGQPREPQVYTLPP
SREEMTKNQVSLTCLVKGFYPSDIAVEWESNGQPENNYKTTPPVLDSDGSFFLYSKLTVDKSRWQQGNVFSCSVM
HEALHNHYTQKSLSLSPGK [symbol]
Chain 3: LAGRSANAGPA-IL-15-(GGS)5-IL-15Rα
(SEQ ID NO: 145) [symbol]
NWVNVISDLKKIEDLIQSMHIDATLYTESDVHPSCKVTAMKCFLLELQVISL
ESGDASIHDTVENLIILANNSLSSNGNVTESGCKECEELEEKNIKEFLQSFVHIVQMFINTA [symbol] [symbol] [symbol]
ITCPPPMSVEHADIWVKSYSLYSRERYICNSGFKRKAGTSSLTECVLNKATNVAHWTTPSLKCIRDPALVHQR
PAPPS
Fc-b-GPLGLSGRSANAGPASG-IL-15(S162A)-(GGS)5-IL-15Rα
>P1339_Fc-b-PS6-L15R-S162A chains 1 and 2
(SEQ ID NO: 146)
EPKSSDKTHTCPPCPAPEAAGGPSVFLFPPKPKDTLYITREPEVTCVVVDVSHEDPEVKFNWYVDGVEVHNAKTK
PREEQYNSTYRVVSVLTVLHQDWLNGKEYKCKVSNKALAAPIEKTISKAKGQPREPQVYTLPPSREEMTKNQVSL
TCLVKGFYPSDIAVEWESNGQPENNYKTTPPVLDSDGSFFLYSKLTVDKSRWQQGNVFSCSVMHEALHNHYTQKS
LSLSPGK [symbol] [symbol] NWVNVISDLKKIEDLIQSMHIDATLYTESDVHPSCKVTAMKCFLLELQVIS
LESGDASIHDTVENLIILANNSLSSNGNVTESGCKECEELEEKNIKEFLQSFVHIVQMFINTA [symbol] [symbol] [symbol]
ITCPPPMSVEHADIWVKSYSLYSRERYICNSGFKRKAGTSSLTECVLNKATNVAHWTTPSLKCIRDPALVHQ
RPAPPS

[0350] Expected Cleavage Products from uPA or Matriptase Cleavage of P1339:

1) Fc-b-GPLGLSGR homodimer (product from complete cleavage)
Chains 1 and 2
(SEQ ID NO: 147)
EPKSSDKTHTCPPCPAPEAAGGPSVFLFPPKPKDTLYITREPEVTCVVVDVSHEDPEVKFNWY
VDGVEVHNAKTKPREEQYNSTYRVVSVLTVLHQDWLNGKEYKCKVSNKALAAPIEKTISKAKGQPREPQVYTLPP
SREEMTKNQVSLTCLVKGFYPSDIAVEWESNGQPENNYKTTPPVLDSDGSFFLYSKLTVDKSRWQQGNVFSCSVM
HEALHNHYTQKSLSLSPGK [symbol]
2) SANAGPASG-IL-15-(GGS)5-IL-15Rα homodimer (product from
complete cleavage, active)
Chains 1 and 2
(SEQ ID NO: 148) [symbol]
NWVNVISDLKKIEDLIQSMHIDATLYTESDVHPSCKVTAMKCFLLELQVISLES
GDASIHDTVENLIILANNSLSSNGNVTESGCKECEELEEKNIKEFLQSFVHIVQMFINTA [symbol] [symbol]
ITCPPPMSVEHADIWVKSYSLYSRERYICNSGFKRKAGTSSLTECVLNKATNVAHWTTPSLKCIRDPALVHQRPA
PPS
3) Fc-b-GPLGLSGRSANAGPASG-IL-15(S162A)-(GGS)5-IL-15Rα/Fc-b-GPLGLSGR/
SANAGPASG-IL-15-(GGS)5-IL-15Rα (product from partial cleavage, active)
Chain 1: Fc-b-PLGLAGRSANAGPA-IL-15(S162A)-(GGS)5-IL-15Rα
(SEQ ID NO: 149)
EPKSSDKTHTCPPCPAPEAAGGPSVFLFPPKPKDTLYITREPEVTCVVVDVSHEDPEVKFNWY
VDGVEVHNAKTKPREEQYNSTYRVVSVLTVLHQDWLNGKEYKCKVSNKALAAPIEKTISKAKGQPREPQVYTLPP
SREEMTKNQVSLTCLVKGFYPSDIAVEWESNGQPENNYKTTPPVLDSDGSFFLYSKLTVDKSRWQQGNVFSCSVM
HEALHNHYTQKSLSLSPGK [symbol] [symbol] NWVNVISDLKKIEDLIQSMHIDATLYTESDVHPSCKVTA
MKCFLLELQVISLESGDASIHDTVENLIILANNSLSSNGNVTESGCKECEELEEKNIKEFLQSFVHIVQMFINTA [symbol] [symbol]
ITCPPPMSVEHADIWVKSYSLYSRERYICNSGFKRKAGTSSLTECVLNKATNVAHWTTPS
LKCIRDPALVHQRPAPPS
Chain 2: Fc-b-GPLGLSGR
(SEQ ID NO: 150)
EPKSSDKTHTCPPCPAPEAAGGPSVFLFPPKPKDTLYITREPEVTCVVVDVSHEDPEVKFNWY
VDGVEVHNAKTKPREEQYNSTYRVVSVLTVLHQDWLNGKEYKCKVSNKALAAPIEKTISKAKGQPREPQVYTLPP
SREEMTKNQVSLTCLVKGFYPSDIAVEWESNGQPENNYKTTPPVLDSDGSFFLYSKLTVDKSRWQQGNVFSCSVM
HEALHNHYTQKSLSLSPGK [symbol]
Chain 3: SANAGPASG-IL-15-(GGS)5-IL-15Rα
(SEQ ID NO: 151) [symbol]
NWVNVISDLKKIEDLIQSMHIDATLYTESDVHPSCKVTAMKCFLLELQVISLES
GDASIHDTVENLIILANNSLSSNGNVTESGCKECEELEEKNIKEFLQSFVHIVQMFINTA [symbol] [symbol]
ITCPPPMSVEHADIWVKSYSLYSRERYICNSGFKRKAGTSSLTECVLNKATNVAHWTTPSLKCIRDPALVHQRPA
PPS

[0351] Expected Cleavage Products from Legumain Cleavage of P1339:

1) Fc-b-GPLGLSGRSAN homodimer (product from complete cleavage)
Chains 1 and 2
(SEQ ID NO: 152)
EPKSSDKTHTCPPCPAPEAAGGPSVFLFPPKPKDTLYITREPEVTCVVVDVSHEDPEVKFNWY
VDGVEVHNAKTKPREEQYNSTYRVVSVLTVLHQDWLNGKEYKCKVSNKALAAPIEKTISKAKGQPREPQVYTLPP
SREEMTKNQVSLTCLVKGFYPSDIAVEWESNGQPENNYKTTPPVLDSDGSFFLYSKLTVDKSRWQQGNVFSCSVM
HEALHNHYTQKSLSLSPGK [symbol]
2) AGPASG-IL-15-(GGS)5-IL-15Rα homodimer (product from complete
cleavage, active)
Chains 1 and 2
(SEQ ID NO: 153) [symbol]
NWVNVISDLKKIEDLIQSMHIDATLYTESDVHPSCKVTAMKCFLLELQVISLESGDA
SIHDTVENLIILANNSLSSNGNVTESGCKECEELEEKNIKEFLQSFVHIVQMFINTA [symbol] [symbol] ITC
PPPMSVEHADIWVKSYSLYSRERYICNSGFKRKAGTSSLTECVLNKATNVAHWTTPSLKCIRDPALVHQRPAPPS
3) Fc-b-GPLGLSGRSANAGPASG-IL-15(S162A)-(GGS)5-IL-15Rα/
Fc-b-GPLGLSGRSAN/AGPA
Chain 1: Fc-b-PLGLAGRSANAGPA-IL-15(S162A)-(GGS)5-IL-15Rα
(SEQ ID NO: 154)
EPKSSDKTHTCPPCPAPEAAGGPSVFLFPPKPKDTLYITREPEVTCVVVDVSHEDPEVKFNWY
VDGVEVHNAKTKPREEQYNSTYRVVSVLTVLHQDWLNGKEYKCKVSNKALAAPIEKTISKAKGQPREPQVYTLPP
SREEMTKNQVSLTCLVKGFYPSDIAVEWESNGQPENNYKTTPPVLDSDGSFFLYSKLTVDKSRWQQGNVFSCSVM
HEALHNHYTQKSLSLSPGK [symbol] [symbol] NWVNVISDLKKIEDLIQSMHIDATLYTESDVHPSCKVTA
MKCFLLELQVISLESGDASIHDTVENLIILANNSLSSNGNVTESGCKECEELEEKNIKEFLQSFVHIVQMFINTA [symbol] [symbol]
ITCPPPMSVEHADIWVKSYSLYSRERYICNSGFKRKAGTSSLTECVLNKATNVAHWTTPS
LKCIRDPALVHQRPAPPS
Chain 2: Fc-b-GPLGLSGRSAN
(SEQ ID NO: 155)
EPKSSDKTHTCPPCPAPEAAGGPSVFLFPPKPKDTLYITREPEVTCVVVDVSHEDPEVKFNWY
VDGVEVHNAKTKPREEQYNSTYRVVSVLTVLHQDWLNGKEYKCKVSNKALAAPIEKTISKAKGQPREPQVYTLPP
SREEMTKNQVSLTCLVKGFYPSDIAVEWESNGQPENNYKTTPPVLDSDGSFFLYSKLTVDKSRWQQGNVFSCSVM
HEALHNHYTQKSLSLSPGK [symbol]
Chain 3: AGPASG-IL-15-(GGS)5-IL-15Rα
(SEQ ID NO: 156) [symbol]
NWVNVISDLKKIEDLIQSMHIDATLYTESDVHPSCKVTAMKCFLLELQVISLESGDA
SIHDTVENLIILANNSLSSNGNVTESGCKECEELEEKNIKEFLQSFVHIVQMFINTA [symbol] [symbol] ITC
PPPMSVEHADIWVKSYSLYSRERYICNSGFKRKAGTSSLTECVLNKATNVAHWTTPSLKCIRDPALVHQRPAPPS

[0352] Expected Cleavage Products from MMP-2 or MMP-9 Cleavage of P1339:

1) Fc-b-GPLG homodimer (product from complete cleavage)
Chains 1 and 2
(SEQ ID NO: 157)
EPKSSDKTHTCPPCPAPEAAGGPSVFLFPPKPKDTLYITREPEVTCVVVDVSHEDPEVKFNWY
VDGVEVHNAKTKPREEQYNSTYRVVSVLTVLHQDWLNGKEYKCKVSNKALAAPIEKTISKAKGQPREPQVYTLPP
SREEMTKNQVSLTCLVKGFYPSDIAVEWESNGQPENNYKTTPPVLDSDGSFFLYSKLTVDKSRWQQGNVFSCSVM
HEALHNHYTQKSLSLSPGK [symbol]
2) LSGRSANAGPASG-IL-15-(GGS)5-IL-15Rα homodimer (product from
complete cleavage, active)
Chains 1 and 2
(SEQ ID NO: 158) [symbol] [symbol]
NWVNVISDLKKIEDLIQSMHIDATLYTESDVHPSCKVTAMKCFLLELQVI
SLESGDASIHDTVENLIILANNSLSSNGNVTESGCKECEELEEKNIKEFLQSFVHIVQMFINT [symbol] [symbol]
ITCPPPMSVEHADIWVKSYSLYSRERYICNSGFKRKAGTSSLTECVLNKATNVAHWTTPSLKCIRDPALVH
QRPAPPS
3) Fc-b-GPLGLSGRSANAGPASG-IL-15(S162A)-(GGS)5-IL-15Rα/Fc-b-GPLG/
LSGRSANAGPASG-IL-15-(GGS)5-IL-15Rα (product from partial cleavage, active)
Chain 1: Fc-b-PLGLAGRSANAGPA-IL-15(S162A)-(GGS)5-IL-15Rα
(SEQ ID NO: 159)
EPKSSDKTHTCPPCPAPEAAGGPSVFLFPPKPKDTLYITREPEVTCVVVDVSHEDPEVKFNWY
VDGVEVHNAKTKPREEQYNSTYRVVSVLTVLHQDWLNGKEYKCKVSNKALAAPIEKTISKAKGQPREPQVYTLPP
SREEMTKNQVSLTCLVKGFYPSDIAVEWESNGQPENNYKTTPPVLDSDGSFFLYSKLTVDKSRWQQGNVFSCSVM
HEALHNHYTQKSLSLSPGK [symbol] [symbol] NWVNVISDLKKIEDLIQSMHIDATLYTESDVHPSCKVTA
MKCFLLELQVISLESGDASIHDTVENLIILANNSLSSNGNVTESGCKECEELEEKNIKEFLQSFVHIVQMFINTA [symbol] [symbol]
ITCPPPMSVEHADIWVKSYSLYSRERYICNSGFKRKAGTSSLTECVLNKATNVAHWTTPS
LKCIRDPALVHQRPAPPS
Chain 2: Fc-b-GPLG
(SEQ ID NO: 160)
EPKSSDKTHTCPPCPAPEAAGGPSVFLFPPKPKDTLYITREPEVTCVVVDVSHEDPEVKFNWY
VDGVEVHNAKTKPREEQYNSTYRVVSVLTVLHQDWLNGKEYKCKVSNKALAAPIEKTISKAKGQPREPQVYTLPP
SREEMTKNQVSLTCLVKGFYPSDIAVEWESNGQPENNYKTTPPVLDSDGSFFLYSKLTVDKSRWQQGNVFSCSVM
HEALHNHYTQKSLSLSPGK [symbol]
Chain 3: LSGRSANAGPASG-IL-15-(GGS)5-IL-15Rα
(SEQ ID NO: 161) [symbol] [symbol]
NWVNVISDLKKIEDLIQSMHIDATLYTESDVHPSCKVTAMKCFLLELQVI
SLESGDASIHDTVENLIILANNSLSSNGNVTESGCKECEELEEKNIKEFLQSFVHIVQMFINTA [symbol] [symbol]
ITCPPPMSVEHADIWVKSYSLYSRERYICNSGFKRKAGTSSLTECVLNKATNVAHWTTPSLKCIRDPALVH
QRPAPPS
Fc-b-GPLGLAGRSANAGPASG-IL-15(S162A)-(GGS)5-IL-15Rα
>P1340_Fc-b-PS7-L15R-S162A chains 1 and 2
(SEQ ID NO: 162)
EPKSSDKTHTCPPCPAPEAAGGPSVFLFPPKPKDTLYITREPEVTCVVVDVSHEDPEVKFNWYVDGVEVHNAKTK
PREEQYNSTYRVVSVLTVLHQDWLNGKEYKCKVSNKALAAPIEKTISKAKGQPREPQVYTLPPSREEMTKNQVSL
TCLVKGFYPSDIAVEWESNGQPENNYKTTPPVLDSDGSFFLYSKLTVDKSRWQQGNVFSCSVMHEALHNHYTQKS
LSLSPGK [symbol] [symbol] NWVNVISDLKKIEDLIQSMHIDATLYTESDVHPSCKVTAMKCFLLELQVIS
LESGDASIHDTVENLIILANNSLSSNGNVTESGCKECEELEEKNIKEFLQSFVHIVQMFINTA [symbol] [symbol]
ITCPPPMSVEHADIWVKSYSLYSRERYICNSGFKRKAGTSSLTECVLNKATNVAHWTTPSLKCIRDPALVHQ
RPAPPS

[0353] Expected Cleavage Products from uPA or Matriptase Cleavage of P1340:

1) Fc-b-GPLGLAGR homodimer (product from complete cleavage)
Chains 1 and 2
(SEQ ID NO: 163)
EPKSSDKTHTCPPCPAPEAAGGPSVFLFPPKPKDTLYITREPEVTCVVVDVSHEDPEVKFNWY
VDGVEVHNAKTKPREEQYNSTYRVVSVLTVLHQDWLNGKEYKCKVSNKALAAPIEKTISKAKGQPREPQVYTLPP
SREEMTKNQVSLTCLVKGFYPSDIAVEWESNGQPENNYKTTPPVLDSDGSFFLYSKLTVDKSRWQQGNVFSCSVM
HEALHNHYTQKSLSLSPGK [symbol]
2) SANAGPASG-IL-15-(GGS)5-IL-15Rα homodimer (product from
complete cleavage, active)
Chains 1 and 2
(SEQ ID NO: 164) [symbol]
NWVNVISDLKKIEDLIQSMHIDATLYTESDVHPSCKVTAMKCFLLELQVISLES
GDASIHDTVENLIILANNSLSSNGNVTESGCKECEELEEKNIKEFLQSFVHIVQMFINTA [symbol] [symbol]
ITCPPPMSVEHADIWVKSYSLYSRERYICNSGFKRKAGTSSLTECVLNKATNVAHWTTPSLKCIRDPALVHQRPA
PPS
3) Fc-b-GPLGLAGRSANAGPASG-IL-15(S162A)-(GGS)5-IL-15Rα/Fc-b-GPLGLAGR/
SANAGPASG-IL-15-(GGS)5-IL-15Rα (product from partial cleavage, active)
Chain 1: Fc-b-GPLGLAGRSANAGPASG-IL-15(S162A)-(GGS)5-IL-15Rα
(SEQ ID NO: 165)
EPKSSDKTHTCPPCPAPEAAGGPSVFLFPPKPKDTLYITREPEVTCVVVDVSHEDPEVKFNWY
VDGVEVHNAKTKPREEQYNSTYRVVSVLTVLHQDWLNGKEYKCKVSNKALAAPIEKTISKAKGQPREPQVYTLPP
SREEMTKNQVSLTCLVKGFYPSDIAVEWESNGQPENNYKTTPPVLDSDGSFFLYSKLTVDKSRWQQGNVFSCSVM
HEALHNHYTQKSLSLSPGK [symbol] [symbol] NWVNVISDLKKIEDLIQSMHIDATLYTESDVHPSCKVTA
MKCFLLELQVISLESGDASIHDTVENLIILANNSLSSNGNVTESGCKECEELEEKNIKEFLQSFVHIVQMFINTA [symbol] [symbol]
ITCPPPMSVEHADIWVKSYSLYSRERYICNSGFKRKAGTSSLTECVLNKATNVAHWTTPS
LKCIRDPALVHQRPAPPS
Chain 2: Fc-b-GPLGLAGR
(SEQ ID NO: 166)
EPKSSDKTHTCPPCPAPEAAGGPSVFLFPPKPKDTLYITREPEVTCVVVDVSHEDPEVKFNWY
VDGVEVHNAKTKPREEQYNSTYRVVSVLTVLHQDWLNGKEYKCKVSNKALAAPIEKTISKAKGQPREPQVYTLPP
SREEMTKNQVSLTCLVKGFYPSDIAVEWESNGQPENNYKTTPPVLDSDGSFFLYSKLTVDKSRWQQGNVFSCSVM
HEALHNHYTQKSLSLSPGK [symbol]
Chain 3: SANAGPASG-IL-15-(GGS)5-IL-15Rα
(SEQ ID NO: 167) [symbol]
NWVNVISDLKKIEDLIQSMHIDATLYTESDVHPSCKVTAMKCFLLELQVISLES
GDASIHDTVENLIILANNSLSSNGNVTESGCKECEELEEKNIKEFLQSFVHIVQMFINTA [symbol] [symbol]
ITCPPPMSVEHADIWVKSYSLYSRERYICNSGFKRKAGTSSLTECVLNKATNVAHWTTPSLKCIRDPALVHQRPA
PPS

[0354] Expected Cleavage Products from Legumain Cleavage of P1340:

1) Fc-b-GPLGLAGRSAN homodimer (product from complete cleavage)
Chains 1 and 2
(SEQ ID NO: 168)
EPKSSDKTHTCPPCPAPEAAGGPSVFLFPPKPKDTLYITREPEVTCVVVDVSHEDPEVKFNWY
VDGVEVHNAKTKPREEQYNSTYRVVSVLTVLHQDWLNGKEYKCKVSNKALAAPIEKTISKAKGQPREPQVYTLPP
SREEMTKNQVSLTCLVKGFYPSDIAVEWESNGQPENNYKTTPPVLDSDGSFFLYSKLTVDKSRWQQGNVFSCSVM
HEALHNHYTQKSLSLSPGK [symbol]
2) AGPASG-IL-15-(GGS)5-IL-15Rα homodimer (product from complete
cleavage, active)
Chains 1 and 2
(SEQ ID NO: 169) [symbol]
NWVNVISDLKKIEDLIQSMHIDATLYTESDVHPSCKVTAMKCFLLELQVISLESGDA
SIHDTVENLIILANNSLSSNGNVTESGCKECEELEEKNIKEFLQSFVHIVQMFINTA [symbol] [symbol] ITC
PPPMSVEHADIWVKSYSLYSRERYICNSGFKRKAGTSSLTECVLNKATNVAHWTTPSLKCIRDPALVHQRPAPPS
3) Fc-b-GPLGLAGRSANAGPASG-IL-15(S162A)-(GGS)5-IL-15Rα/Fc-b-GPLGLAGRSAN/
AGPASG-IL-15-(GGS)5-IL-15Rα (product from partial cleavage, active)
Chain 1: Fc-b-GPLGLAGRSANAGPASG-IL-15(S162A)-(GGS)5-IL-15Rα
(SEQ ID NO: 170)
EPKSSDKTHTCPPCPAPEAAGGPSVFLFPPKPKDTLYITREPEVTCVVVDVSHEDPEVKFNWY
VDGVEVHNAKTKPREEQYNSTYRVVSVLTVLHQDWLNGKEYKCKVSNKALAAPIEKTISKAKGQPREPQVYTLPP
SREEMTKNQVSLTCLVKGFYPSDIAVEWESNGQPENNYKTTPPVLDSDGSFFLYSKLTVDKSRWQQGNVFSCSVM
HEALHNHYTQKSLSLSPGK [symbol] [symbol] NWVNVISDLKKIEDLIQSMHIDATLYTESDVHPSCKVTA
MKCFLLELQVISLESGDASIHDTVENLIILANNSLSSNGNVTESGCKECEELEEKNIKEFLQSFVHIVQMFINTA [symbol] [symbol]
ITCPPPMSVEHADIWVKSYSLYSRERYICNSGFKRKAGTSSLTECVLNKATNVAHWTTPS
LKCIRDPALVHQRPAPPS
Chain 2: Fc-b-GPLGLAGRSAN
(SEQ ID NO: 171)
EPKSSDKTHTCPPCPAPEAAGGPSVFLFPPKPKDTLYITREPEVTCVVVDVSHEDPEVKFNWY
VDGVEVHNAKTKPREEQYNSTYRVVSVLTVLHQDWLNGKEYKCKVSNKALAAPIEKTISKAKGQPREPQVYTLPP
SREEMTKNQVSLTCLVKGFYPSDIAVEWESNGQPENNYKTTPPVLDSDGSFFLYSKLTVDKSRWQQGNVFSCSVM
HEALHNHYTQKSLSLSPGK [symbol]
Chain 3: AGPASG-IL-15-(GGS)5-IL-15Rα
(SEQ ID NO: 172) [symbol]
NWVNVISDLKKIEDLIQSMHIDATLYTESDVHPSCKVTAMKCFLLELQVISLESGDA
SIHDTVENLIILANNSLSSNGNVTESGCKECEELEEKNIKEFLQSFVHIVQMFINTA [symbol] [symbol] ITC
PPPMSVEHADIWVKSYSLYSRERYICNSGFKRKAGTSSLTECVLNKATNVAHWTTPSLKCIRDPALVHQRPAPPS

[0355] Expected Cleavage Products from MMP-2 or MMP-9 Cleavage of P1340:

1) Fc-b-GPLG homodimer (product from complete cleavage)
Chains 1 and 2
(SEQ ID NO: 173)
EPKSSDKTHTCPPCPAPEAAGGPSVFLFPPKPKDTLYITREPEVTCVVVDVSHEDPEVKFNWY
VDGVEVHNAKTKPREEQYNSTYRVVSVLTVLHQDWLNGKEYKCKVSNKALAAPIEKTISKAKGQPREPQVYTLPP
SREEMTKNQVSLTCLVKGFYPSDIAVEWESNGQPENNYKTTPPVLDSDGSFFLYSKLTVDKSRWQQGNVFSCSVM
HEALHNHYTQKSLSLSPGK [symbol]
2) LAGRSANAGPASG-IL-15-(GGS)5-IL-15Rα homodimer (product from
complete cleavage, active)
Chains 1 and 2
(SEQ ID NO: 174) [symbol] [symbol]
NWVNVISDLKKIEDLIQSMHIDATLYTESDVHPSCKVTAMKCFLLELQVI
SLESGDASIHDTVENLIILANNSLSSNGNVTESGCKECEELEEKNIKEFLQSFVHIVQMFINT [symbol] [symbol]
ITCPPPMSVEHADIWVKSYSLYSRERYICNSGFKRKAGTSSLTECVLNKATNVAHWTTPSLKCIRDPALVH
QRPAPPS
3) Fc-b-GPLGLAGRSANAGPASG-IL-15(S162A)-(GGS)5-IL-15Rα/Fc-b-GPLG/
LAGRSANAGPASG-IL-15-(GGS)5-IL-15Rα (product from partial cleavage, active)
Chain 1: Fc-b-GPLGLAGRSANAGPASG-IL-15(S162A)-(GGS)5-IL-15Rα
(SEQ ID NO: 175)
EPKSSDKTHTCPPCPAPEAAGGPSVFLFPPKPKDTLYITREPEVTCVVVDVSHEDPEVKFNWY
VDGVEVHNAKTKPREEQYNSTYRVVSVLTVLHQDWLNGKEYKCKVSNKALAAPIEKTISKAKGQPREPQVYTLPP
SREEMTKNQVSLTCLVKGFYPSDIAVEWESNGQPENNYKTTPPVLDSDGSFFLYSKLTVDKSRWQQGNVFSCSVM
HEALHNHYTQKSLSLSPGK [symbol] [symbol] NWVNVISDLKKIEDLIQSMHIDATLYTESDVHPSCKVTA
MKCFLLELQVISLESGDASIHDTVENLIILANNSLSSNGNVTESGCKECEELEEKNIKEFLQSFVHIVQMFINTA [symbol] [symbol]
ITCPPPMSVEHADIWVKSYSLYSRERYICNSGFKRKAGTSSLTECVLNKATNVAHWTTPS
LKCIRDPALVHQRPAPPS
Chain 2: Fc-b-GPLG
(SEQ ID NO: 176)
EPKSSDKTHTCPPCPAPEAAGGPSVFLFPPKPKDTLYITREPEVTCVVVDVSHEDPEVKFNWY
VDGVEVHNAKTKPREEQYNSTYRVVSVLTVLHQDWLNGKEYKCKVSNKALAAPIEKTISKAKGQPREPQVYTLPP
SREEMTKNQVSLTCLVKGFYPSDIAVEWESNGQPENNYKTTPPVLDSDGSFFLYSKLTVDKSRWQQGNVFSCSVM
HEALHNHYTQKSLSLSPGK [symbol]
Chain 3: LAGRSANAGPASG-IL-15-(GGS)5-IL-15Rα
(SEQ ID NO: 177) [symbol] [symbol]
NWVNVISDLKKIEDLIQSMHIDATLYTESDVHPSCKVTAMKCFLLELQVI
SLESGDASIHDTVENLIILANNSLSSNGNVTESGCKECEELEEKNIKEFLQSFVHIVQMFINTA [symbol] [symbol] [symbol]
ITCPPPMSVEHADIWVKSYSLYSRERYICNSGFKRKAGTSSLTECVLNKATNVAHWTTPSLKCIRDPALVH
QRPAPPS
Fc-b-SGPLGLAGRSANAGPAS-IL-15(S162A)-(GGS)5-IL-15Rα
>P1341_Fc-b-PS8-L15R-S162A) chains 1 and 2
(SEQ ID NO: 178)
EPKSSDKTHTCPPCPAPEAAGGPSVFLFPPKPKDTLYITREPEVTCVVVDVSHEDPEVKFNWYVDGVEVHNAKTK
PREEQYNSTYRVVSVLTVLHQDWLNGKEYKCKVSNKALAAPIEKTISKAKGQPREPQVYTLPPSREEMTKNQVSL
TCLVKGFYPSDIAVEWESNGQPENNYKTTPPVLDSDGSFFLYSKLTVDKSRWQQGNVFSCSVMHEALHNHYTQKS
LSLSPGK [symbol] [symbol] NWVNVISDLKKIEDLIQSMHIDATLYTESDVHPSCKVTAMKCFLLELQVIS
LESGDASIHDTVENLIILANNSLSSNGNVTESGCKECEELEEKNIKEFLQSFVHIVQMFINTA [symbol] [symbol] [symbol]
ITCPPPMSVEHADIWVKSYSLYSRERYICNSGFKRKAGTSSLTECVLNKATNVAHWTTPSLKCIRDPALVHQ
RPAPPS

[0356] Expected Cleavage Products from uPA or Matriptase Cleavage of P1341:

1) Fc-b-SGPLGLAGR homodimer (product from complete cleavage)
Chains 1 and 2
(SEQ ID NO: 179)
EPKSSDKTHTCPPCPAPEAAGGPSVFLFPPKPKDTLYITREPEVTCVVVDVSHEDPEVKFNWY
VDGVEVHNAKTKPREEQYNSTYRVVSVLTVLHQDWLNGKEYKCKVSNKALAAPIEKTISKAKGQPREPQVYTLPP
SREEMTKNQVSLTCLVKGFYPSDIAVEWESNGQPENNYKTTPPVLDSDGSFFLYSKLTVDKSRWQQGNVFSCSVM
HEALHNHYTQKSLSLSPGKSGPLGLAGR
2) SANAGPAS-IL-15-(GGS)5-IL-15Rα homodimer (product from
complete cleavage, active)
Chains 1 and 2
(SEQ ID NO: 180) [symbol]
NWVNVISDLKKIEDLIQSMHIDATLYTESDVHPSCKVTAMKCFLLELQVISLESG
DASIHDTVENLIILANNSLSSNGNVTESGCKECEELEEKNIKEFLQSFVHIVQMFINTA [symbol] [symbol] I
TCPPPMSVEHADIWVKSYSLYSRERYICNSGFKRKAGTSSLTECVLNKATNVAHWTTPSLKCIRDPALVHQRPAP
PS
3) Fc-b-SGPLGLAGRSANAGPAS-IL-15(S162A)-(GGS)5-IL-15Rα/Fc-b-SGPLGLAGR/
SANAGPAS-IL-15-(GGS)5-IL-15Rα (product from partial cleavage, active)
Chain 1: Fc-b-SGPLGLAGRSANAGPAS-IL-15(S162A)-(GGS)5-IL-15Rα
(SEQ ID NO: 181)
EPKSSDKTHTCPPCPAPEAAGGPSVFLFPPKPKDTLYITREPEVTCVVVDVSHEDPEVKFNWY
VDGVEVHNAKTKPREEQYNSTYRVVSVLTVLHQDWLNGKEYKCKVSNKALAAPIEKTISKAKGQPREPQVYTLPP
SREEMTKNQVSLTCLVKGFYPSDIAVEWESNGQPENNYKTTPPVLDSDGSFFLYSKLTVDKSRWQQGNVFSCSVM
HEALHNHYTQKSLSLSPGK [symbol] [symbol] NWVNVISDLKKIEDLIQSMHIDATLYTESDVHPSCKVTA
MKCFLLELQVISLESGDASIHDTVENLIILANNSLSSNGNVTESGCKECEELEEKNIKEFLQSFVHIVQMFINTA [symbol] [symbol]
ITCPPPMSVEHADIWVKSYSLYSRERYICNSGFKRKAGTSSLTECVLNKATNVAHW
TTPSLKCIRDPALVHQRPAPPS
Chain 2: Fc-b-SGPLGLAGR
(SEQ ID NO: 182)
EPKSSDKTHTCPPCPAPEAAGGPSVFLFPPKPKDTLYITREPEVTCVVVDVSHEDPEVKFNWY
VDGVEVHNAKTKPREEQYNSTYRVVSVLTVLHQDWLNGKEYKCKVSNKALAAPIEKTISKAKGQPREPQVYTLPP
SREEMTKNQVSLTCLVKGFYPSDIAVEWESNGQPENNYKTTPPVLDSDGSFFLYSKLTVDKSRWQQGNVFSCSVM
HEALHNHYTQKSLSLSPGK [symbol]
Chain 3: SANAGPAS-IL-15-(GGS)5-IL-15Rα
(SEQ ID NO: 183) [symbol]
NWVNVISDLKKIEDLIQSMHIDATLYTESDVHPSCKVTAMKCFLLELQVISLESG
DASIHDTVENLIILANNSLSSNGNVTESGCKECEELEEKNIKEFLQSFVHIVQMFINTA [symbol] [symbol] I
TCPPPMSVEHADIWVKSYSLYSRERYICNSGFKRKAGTSSLTECVLNKATNVAHWTTPSLKCIRDPALVHQRPAP
PS

[0357] Expected Cleavage Products from Legumain Cleavage of P1341:

1) Fc-b-SGPLGLAGRSAN homodimer (product from complete cleavage)
Chains 1 and 2
(SEQ ID NO: 184)
EPKSSDKTHTCPPCPAPEAAGGPSVFLFPPKPKDTLYITREPEVTCVVVDVSHEDPEVKFNWY
VDGVEVHNAKTKPREEQYNSTYRVVSVLTVLHQDWLNGKEYKCKVSNKALAAPIEKTISKAKGQPREPQVYTLPP
SREEMTKNQVSLTCLVKGFYPSDIAVEWESNGQPENNYKTTPPVLDSDGSFFLYSKLTVDKSRWQQGNVFSCSVM
HEALHNHYTQKSLSLSPGK [symbol] [symbol]
2) AGPAS-IL-15-(GGS)5-IL-15Rα homodimer (product from complete
cleavage, active)
Chains 1 and 2
(SEQ ID NO: 185) [symbol]
NWVNVISDLKKIEDLIQSMHIDATLYTESDVHPSCKVTAMKCFLLELQVISLESGDAS
IHDTVENLIILANNSLSSNGNVTESGCKECEELEEKNIKEFLQSFVHIVQMFINTA [symbol] [symbol] ITCP
PPMSVEHADIWVKSYSLYSRERYICNSGFKRKAGTSSLTECVLNKATNVAHWTTPSLKCIRDPALVHQRPAPPS
3) Fc-b-SGPLGLAGRSANAGPAS-IL-15(S162A)-(GGS)5-IL-15Rα/Fc-b-SGPLGLAGRSAN/
AGPAS-IL-15-(GGS)5-IL-15Rα (product from partial cleavage, active)
Chain 1: Fc-b-SGPLGLAGRSANAGPAS-IL-15(S162A)-(GGS)5-IL-15Rα
(SEQ ID NO: 186)
EPKSSDKTHTCPPCPAPEAAGGPSVFLFPPKPKDTLYITREPEVTCVVVDVSHEDPEVKFNWY
VDGVEVHNAKTKPREEQYNSTYRVVSVLTVLHQDWLNGKEYKCKVSNKALAAPIEKTISKAKGQPREPQVYTLPP
SREEMTKNQVSLTCLVKGFYPSDIAVEWESNGQPENNYKTTPPVLDSDGSFFLYSKLTVDKSRWQQGNVFSCSVM
HEALHNHYTQKSLSLSPGK [symbol] [symbol] NWVNVISDLKKIEDLIQSMHIDATLYTESDVHPSCKVTA
MKCFLLELQVISLESGDASIHDTVENLIILANNSLSSNGNVTESGCKECEELEEKNIKEFLQSFVHIVQMFINTA [symbol] [symbol]
ITCPPPMSVEHADIWVKSYSLYSRERYICNSGFKRKAGTSSLTECVLNKATNVAHWTTPS
LKCIRDPALVHQRPAPPS
Chain 2: Fc-b-SGPLGLAGRSAN
(SEQ ID NO: 187)
EPKSSDKTHTCPPCPAPEAAGGPSVFLFPPKPKDTLYITREPEVTCVVVDVSHEDPEVKFNWY
VDGVEVHNAKTKPREEQYNSTYRVVSVLTVLHQDWLNGKEYKCKVSNKALAAPIEKTISKAKGQPREPQVYTLPP
SREEMTKNQVSLTCLVKGFYPSDIAVEWESNGQPENNYKTTPPVLDSDGSFFLYSKLTVDKSRWQQGNVFSCSVM
HEALHNHYTQKSLSLSPGK [symbol]
Chain 3: AGPAS-IL-15-(GGS)5-IL-15Rα
(SEQ ID NO: 188) [symbol]
NWVNVISDLKKIEDLIQSMHIDATLYTESDVHPSCKVTAMKCFLLELQVISLESGDAS
IHDTVENLIILANNSLSSNGNVTESGCKECEELEEKNIKEFLQSFVHIVQMFINTA [symbol] [symbol] ITCP
PPMSVEHADIWVKSYSLYSRERYICNSGFKRKAGTSSLTECVLNKATNVAHWTTPSLKCIRDPALVHQRPAPPS

[0358] Expected Cleavage Products from MMP-2 or MMP-9 Cleavage of P1341:

1) Fc-b-SGPLG homodimer (product from complete cleavage)
Chains 1 and 2
(SEQ ID NO: 189)
EPKSSDKTHTCPPCPAPEAAGGPSVFLFPPKPKDTLYITREPEVTCVVVDVSHEDPEVKFNWY
VDGVEVHNAKTKPREEQYNSTYRVVSVLTVLHQDWLNGKEYKCKVSNKALAAPIEKTISKAKGQPREPQVYTLPP
SREEMTKNQVSLTCLVKGFYPSDIAVEWESNGQPENNYKTTPPVLDSDGSFFLYSKLTVDKSRWQQGNVFSCSVM
HEALHNHYTQKSLSLSPGK [symbol]
2) LAGRSANAGPAS-IL-15-(GGS)5-IL-15Rα homodimer (product from
complete cleavage, active)
Chains 1 and 2
(SEQ ID NO: 190) [symbol]
NWVNVISDLKKIEDLIQSMHIDATLYTESDVHPSCKVTAMKCFLLELQVIS
LESGDASIHDTVENLIILANNSLSSNGNVTESGCKECEELEEKNIKEFLQSFVHIVQMFINTA [symbol] [symbol]
ITCPPPMSVEHADIWVKSYSLYSRERYICNSGFKRKAGTSSLTECVLNKATNVAHWTTPSLKCIRDPALVHQ
RPAPPS
3) Fc-b-SGPLGLAGRSANAGPAS-IL-15(S162A)-(GGS)5-IL-15Rα/Fc-b-SGPLG/
LAGRSANAGPAS-IL-15-(GGS)5-IL-15Rα (product from partial cleavage, active)
Chain 1: Fc-b-SGPLGLAGRSANAGPAS-IL-15(S162A)-(GGS)5-IL-15Rα
(SEQ ID NO: 191)
EPKSSDKTHTCPPCPAPEAAGGPSVFLFPPKPKDTLYITREPEVTCVVVDVSHEDPEVKFNWY
VDGVEVHNAKTKPREEQYNSTYRVVSVLTVLHQDWLNGKEYKCKVSNKALAAPIEKTISKAKGQPREPQVYTLPP
SREEMTKNQVSLTCLVKGFYPSDIAVEWESNGQPENNYKTTPPVLDSDGSFFLYSKLTVDKSRWQQGNVFSCSVM
HEALHNHYTQKSLSLSPGK [symbol] [symbol] NWVNVISDLKKIEDLIQSMHIDATLYTESDVHPSCKVTA
MKCFLLELQVISLESGDASIHDTVENLIILANNSLSSNGNVTESGCKECEELEEKNIKEFLQSFVHIVQMFINTA [symbol] [symbol]
ITCPPPMSVEHADIWVKSYSLYSRERYICNSGFKRKAGTSSLTECVLNKATNVAHWTTPS
LKCIRDPALVHQRPAPPS
Chain 2: Fc-b-SGPLG
(SEQ ID NO: 192)
EPKSSDKTHTCPPCPAPEAAGGPSVFLFPPKPKDTLYITREPEVTCVVVDVSHEDPEVKFNWY
VDGVEVHNAKTKPREEQYNSTYRVVSVLTVLHQDWLNGKEYKCKVSNKALAAPIEKTISKAKGQPREPQVYTLPP
SREEMTKNQVSLTCLVKGFYPSDIAVEWESNGQPENNYKTTPPVLDSDGSFFLYSKLTVDKSRWQQGNVFSCSVM
HEALHNHYTQKSLSLSPGK [symbol]
Chain 3: LAGRSANAGPAS-IL-15-(GGS)5-IL-15Rα
(SEQ ID NO: 1953) [symbol]
NWVNVISDLKKIEDLIQSMHIDATLYTESDVHPSCKVTAMKCFLLELQVIS
LESGDASIHDTVENLIILANNSLSSNGNVTESGCKECEELEEKNIKEFLQSFVHIVQMFINTA [symbol] [symbol]
ITCPPPMSVEHADIWVKSYSLYSRERYICNSGFKRKAGTSSLTECVLNKATNVAHWTTPSLKCIRDPALVHQ
RPAPPS
Fc-b-SGPASGRSANAPLGLAG-IL-15(S162A)-(GGS)5-IL-15Rα
>P1342_Fc-b-PS9-L15R-S162A chains 1 and 2
(SEQ ID NO: 194)
EPKSSDKTHTCPPCPAPEAAGGPSVFLFPPKPKDTLYITREPEVTCVVVDVSHEDPEVKFNWYVDGVEVHNAKTK
PREEQYNSTYRVVSVLTVLHQDWLNGKEYKCKVSNKALAAPIEKTISKAKGQPREPQVYTLPPSREEMTKNQVSL
TCLVKGFYPSDIAVEWESNGQPENNYKTTPPVLDSDGSFFLYSKLTVDKSRWQQGNVFSCSVMHEALHNHYTQKS
LSLSPGK [symbol] [symbol] NWVNVISDLKKIEDLIQSMHIDATLYTESDVHPSCKVTAMKCFLLELQVIS
LESGDASIHDTVENLIILANNSLSSNGNVTESGCKECEELEEKNIKEFLQSFVHIVQMFINTA [symbol] [symbol]
ITCPPPMSVEHADIWVKSYSLYSRERYICNSGFKRKAGTSSLTECVLNKATNVAHWTTPSLKCIRDPALVHQ
RPAPPS

[0359] Expected Cleavage Products from uPA or Matriptase Cleavage of P1342:

```
1) Fc-b-SGPASGR homodimer (product from complete cleavage) (SEQ
ID NO: 195)
Chains 1 and 2
                        EPKSSDKTHTCPPCPAPEAAGGPSVFLFPPKPKDTLYITREPEVTCVVVDVSHEDPEVKFNWY
VDGVEVHNAKTKPREEQYNSTYRVVSVLTVLHQDWLNGKEYKCKVSNKALAAPIEKTISKAKGQPREPQVYTLPP
SREEMTKNQVSLTCLVKGFYPSDIAVEWESNGQPENNYKTTPPVLDSDGSFFLYSKLTVDKSRWQQGNVFSCSVM
HEALHNHYTQKSLSLSPGK [symbol]
2) SANAPLGLAG-IL-15-(GGS)5-IL-15Rα homodimer(product from
complete cleavage, active) (SEQ ID NO: 196)
Chains 1 and 2 [symbol]
                  NWVNVISDLKKIEDLIQSMHIDATLYTESDVHPSCKVTAMKCELLELQVISLE
SGDASIHDTVENLIILANNSLSSNGNVTESGCKECEELEEKNIKEFLQSFVHIVQMFINTA [symbol] [symbol] [symbol]
ITCPPPMSVEHADIWVKSYSLYSRERYICNSGFKRKAGTSSLTECVLNKATNVAHWTTPSLKCIRDPALVHQRP
APPS
3) Fc-b-SGPASGRSANAPLGLAG-IL-15(S162A)-(GGS)5-IL-15Rα/Fc-b-
SGPASGR/SANAPLGLAG-IL-15-(GGS)5-IL-15Rα (product from partial cleavage,
active)
Chain 1: Fc-b-SGPASGRSANAPLGLAG-IL-15(S162A)-(GGS)5-IL-15Rα (SEQ
ID NO: 197)
                        EPKSSDKTHTCPPCPAPEAAGGPSVFLFPPKPKDTLYITREPEVTCVVVDVSHEDPEVKFNWY
VDGVEVHNAKTKPREEQYNSTYRVVSVLTVLHQDWLNGKEYKCKVSNKALAAPIEKTISKAKGQPREPQVYTLPP
SREEMTKNQVSLTCLVKGFYPSDIAVEWESNGQPENNYKTTPPVLDSDGSFFLYSKLTVDKSRWQQGNVFSCSVM
HEALHNHYTQKSLSLSPGK [symbol] [symbol] NWVNVISDLKKIEDLIQSMHIDATLYTESDVHPSCKVTA
MKCFLLELQVISLESGDASIHDTVENLIILANNSLSSNGNVTESGCKECEELEEKNIKEFLQSFVHIVQMFINTA [symbol] [symbol] [symbol]
ITCPPPMSVEHADIWVKSYSLYSRERYICNSGFKRKAGTSSLTECVLNKATNVAHWTTPS
LKCIRDPALVHQRPAPPS
Chain 2: Fc-b-SGPASGR (SEQ ID NO: 198)
                      EPKSSDKTHTCPPCPAPEAAGGPSVFLFPPKPKDTLYITREPEVTCVVVDVSHEDPEVKFNWY
VDGVEVHNAKTKPREEQYNSTYRVVSVLTVLHQDWLNGKEYKCKVSNKALAAPIEKTISKAKGQPREPQVYTLPP
SREEMTKNQVSLTCLVKGFYPSDIAVEWESNGQPENNYKTTPPVLDSDGSFFLYSKLTVDKSRWQQGNVFSCSVM
HEALHNHYTQKSLSLSPGK [symbol]
Chain 3: SANAPLGLAG-IL-15-(GGS)5-IL-15Rα (SEQ ID NO: 199) [symbol]
                        NWVNVISDLKKIEDLIQSMHIDATLYTESDVHPSCKVTAMKCELLELQVISLE
SGDASIHDTVENLIILANNSLSSNGNVTESGCKECEELEEKNIKEFLQSFVHIVQMFINTA [symbol] [symbol] [symbol]
ITCPPPMSVEHADIWVKSYSLYSRERYICNSGFKRKAGTSSLTECVLNKATNVAHWTTPSLKCIRDPALVHQRP
APPS
```

[0360] Expected Cleavage Products from Legumain Cleavage of P1342:

```
1) Fc-b-SGPASGRSAN homodimer (product from complete
cleavage) (SEQ ID NO: 200)
Chains 1 and 2
                        EPKSSDKTHTCPPCPAPEAAGGPSVFLFPPKPKDTLYITREPEVTCVVVDVSHEDPEVKFNWY
VDGVEVHNAKTKPREEQYNSTYRVVSVLTVLHQDWLNGKEYKCKVSNKALAAPIEKTISKAKGQPREPQVYTLPP
SREEMTKNQVSLTCLVKGFYPSDIAVEWESNGQPENNYKTTPPVLDSDGSFFLYSKLTVDKSRWQQGNVFSCSVM
HEALHNHYTQKSLSLSPGK [symbol]
2) APLGLAG-IL-15-(GGS)5-IL-15Rα homodimer (product from complete
cleavage, active) (SEQ ID NO: 201)
Chains 1 and 2 [symbol]
                        NWVNVISDLKKIEDLIQSMHIDATLYTESDVHPSCKVTAMKCELLELQVISLESGD
ASIHDTVENLIILANNSLSSNGNVTESGCKECEELEEKNIKEFLQSFVHIVQMFINTA [symbol] [symbol] IT
CPPPMSVEHADIWVKSYSLYSRERYICNSGFKRKAGTSSLTECVLNKATNVAHWTTPSLKCIRDPALVHQRPAPP
S
3) Fc-b-SGPASGRSANAPLGLAG-IL-15(S162A)-(GGS)5-IL-15Rα/Fc-b-
SGPASGRSAN/APLGLAG-IL-15-(GGS)5-IL-15Rα (product from partial cleavage,
active)
Chain 1: Fc-b-SGPASGRSANAPLGLAG-IL-15(S162A)-(GGS)5-IL-15Rα (SEQ
ID NO: 202)
                        EPKSSDKTHTCPPCPAPEAAGGPSVFLFPPKPKDTLYITREPEVTCVVVDVSHEDPEVKFNWY
VDGVEVHNAKTKPREEQYNSTYRVVSVLTVLHQDWLNGKEYKCKVSNKALAAPIEKTISKAKGQPREPQVYTLPP
SREEMTKNQVSLTCLVKGFYPSDIAVEWESNGQPENNYKTTPPVLDSDGSFFLYSKLTVDKSRWQQGNVFSCSVM
HEALHNHYTQKSLSLSPGK [symbol] [symbol] NWVNVISDLKKIEDLIQSMHIDATLYTESDVHPSCKVTA
MKCFLLELQVISLESGDASIHDTVENLIILANNSLSSNGNVTESGCKECEELEEKNIKEFLQSFVHIVQMFINTA [symbol] [symbol]
ITCPPPMSVEHADIWVKSYSLYSRERYICNSGFKRKAGTSSLTECVLNKATNVAHWTTPS
LKCIRDPALVHQRPAPPS
Chain 2: Fc-b-SGPASGRSAN (SEQ ID NO: 203)
                        EPKSSDKTHTCPPCPAPEAAGGPSVFLFPPKPKDTLYITREPEVTCVVVDVSHEDPEVKFNWY
VDGVEVHNAKTKPREEQYNSTYRVVSVLTVLHQDWLNGKEYKCKVSNKALAAPIEKTISKAKGQPREPQVYTLPP
SREEMTKNQVSLTCLVKGFYPSDIAVEWESNGQPENNYKTTPPVLDSDGSFFLYSKLTVDKSRWQQGNVFSCSVM
HEALHNHYTQKSLSLSPGK [symbol]
Chain 3: APLGLAG-IL-15-(GGS)5-IL-15Rα (SEQ ID NO: 204) [symbol]
                        NWVNVISDLKKIEDLIQSMHIDATLYTESDVHPSCKVTAMKCELLELQVISLESGD
ASIHDTVENLIILANNSLSSNGNVTESGCKECEELEEKNIKEFLQSFVHIVQMFINTA [symbol] [symbol] IT
CPPPMSVEHADIWVKSYSLYSRERYICNSGFKRKAGTSSLTECVLNKATNVAHWTTPSLKCIRDPALVHQRPAPP
S
```

[0361] Expected Cleavage Products from MMP-2 or MMP-9 Cleavage of P1342:

```
1) Fc-b-SGPASGRSANAPLG homodimer (product from complete
cleavage) (SEQ ID NO: 205)
Chains 1 and 2
                        EPKSSDKTHTCPPCPAPEAAGGPSVFLFPPKPKDTLYITREPEVTCVVVDVSHEDPEVKFNWY
VDGVEVHNAKTKPREEQYNSTYRVVSVLTVLHQDWLNGKEYKCKVSNKALAAPIEKTISKAKGQPREPQVYTLPP
SREEMTKNQVSLTCLVKGFYPSDIAVEWESNGQPENNYKTTPPVLDSDGSFFLYSKLTVDKSRWQQGNVFSCSVM
HEALHNHYTQKSLSLSPGK [symbol] [symbol]
2) LAG-IL-15-(GGS)5-IL-15Rα homodimer (product from complete
cleavage, active) (SEQ ID NO: 206)
Chains 1 and 2 [symbol]
                        NWVNVISDLKKIEDLIQSMHIDATLYTESDVHPSCKVTAMKCELLELQVISLESGDASIH
DTVENLIILANNSLSSNGNVTESGCKECEELEEKNIKEFLQSFVHIVQMFINTA [symbol] [symbol] ITCPPP
MSVEHADIWVKSYSLYSRERYICNSGFKRKAGTSSLTECVLNKATNVAHWTTPSLKCIRDPALVHQRPAPPS
3) Fc-b-SGPASGRSANAPLGLAG-IL-15(S162A)-(GGS)5-IL-15Rα/Fc-b-
SGPASGRSANAPLG/LAG-IL-15-(GGS)5-IL-15Rα (product from partial cleavage,
active)
Chain 1: Fc-b-SGPASGRSANAPLGLAG-IL-15(S162A)-(GGS)5-IL-15Rα (SEQ
ID NO: 207)
                        EPKSSDKTHTCPPCPAPEAAGGPSVFLFPPKPKDTLYITREPEVTCVVVDVSHEDPEVKFNWY
VDGVEVHNAKTKPREEQYNSTYRVVSVLTVLHQDWLNGKEYKCKVSNKALAAPIEKTISKAKGQPREPQVYTLPP
SREEMTKNQVSLTCLVKGFYPSDIAVEWESNGQPENNYKTTPPVLDSDGSFFLYSKLTVDKSRWQQGNVFSCSVM
HEALHNHYTQKSLSLSPGK [symbol] [symbol] NWVNVISDLKKIEDLIQSMHIDATLYTESDVHPSCKVTA
MKCFLLELQVISLESGDASIHDTVENLIILANNSLSSNGNVTESGCKECEELEEKNIKEFLQSFVHIVQMFINTA [symbol] [symbol]
ITCPPPMSVEHADIWVKSYSLYSRERYICNSGFKRKAGTSSLTECVLNKATNVAHWTTPS
LKCIRDPALVHQRPAPPS
Chain 2: Fc-b-SGPASGRSANAPLG (SEQ ID NO: 208)
                        EPKSSDKTHTCPPCPAPEAAGGPSVFLFPPKPKDTLYITREPEVTCVVVDVSHEDPEVKFNWY
VDGVEVHNAKTKPREEQYNSTYRVVSVLTVLHQDWLNGKEYKCKVSNKALAAPIEKTISKAKGQPREPQVYTLPP
SREEMTKNQVSLTCLVKGFYPSDIAVEWESNGQPENNYKTTPPVLDSDGSFFLYSKLTVDKSRWQQGNVFSCSVM
HEALHNHYTQKSLSLSPGKSGPASGRSANAPLG
Chain 3: LAG-IL-15-(GGS)5-IL-15Rα (SEQ ID NO: 209) [symbol]
                        NWVNVISDLKKIEDLIQSMHIDATLYTESDVHPSCKVTAMKCELLELQVISLESGDASIH
DTVENLIILANNSLSSNGNVTESGCKECEELEEKNIKEFLQSFVHIVQMFINTA [symbol] [symbol] ITCPPP
MSVEHADIWVKSYSLYSRERYICNSGFKRKAGTSSLTECVLNKATNVAHWTTPSLKCIRDPALVHQRPAPPS
Fc-b-GSGPASGRSANAPLGLAGS-IL-15(S162A)-(GGS)5-IL-15Rα (SEQ ID NO:
210)
>P1343_Fc-b-PS10-L15R-S162A chains 1 and 2
EPKSSDKTHTCPPCPAPEAAGGPSVFLFPPKPKDTLYITREPEVTCVVVDVSHEDPEVKFNWYVDGVEVHNAKTK
PREEQYNSTYRVVSVLTVLHQDWLNGKEYKCKVSNKALAAPIEKTISKAKGQPREPQVYTLPPSREEMTKNQVSL
TCLVKGFYPSDIAVEWESNGQPENNYKTTPPVLDSDGSFFLYSKLTVDKSRWQQGNVFSCSVMHEALHNHYTQKS
LSLSPGK [symbol] [symbol] NWVNVISDLKKIEDLIQSMHIDATLYTESDVHPSCKVTAMKCELLELQV
ISLESGDASIHDTVENLIILANNSLSSNGNVTESGCKECEELEEKNIKEFLQSFVHIVQMFINTA [symbol] [symbol]
ITCPPPMSVEHADIWVKSYSLYSRERYICNSGFKRKAGTSSLTECVLNKATNVAHWTTPSLKCIRDPALV
HQRPAPPS
```

[0362] Expected Cleavage Products from uPA or Matriptase Cleavage of P1343:

```
1) Fc-b-GSGPASGR homodimer (product from complete cleavage)(SEQ
ID NO: 211)
Chains 1 and 2
                        EPKSSDKTHTCPPCPAPEAAGGPSVFLFPPKPKDTLYITREPEVTCVVVDVSHEDPEVKFNWY
VDGVEVHNAKTKPREEQYNSTYRVVSVLTVLHQDWLNGKEYKCKVSNKALAAPIEKTISKAKGQPREPQVYTLPP
SREEMTKNQVSLTCLVKGFYPSDIAVEWESNGQPENNYKTTPPVLDSDGSFFLYSKLTVDKSRWQQGNVFSCSVM
HEALHNHYTQKSLSLSPGK [symbol]
2) SANAPLGLAGS-IL-15-(GGS)5-IL-15Rα homodimer (product from
complete cleavage, active) (SEQ ID NO: 212)
Chains 1 and 2 [symbol]
                        NWVNVISDLKKIEDLIQSMHIDATLYTESDVHPSCKVTAMKCELLELQVISL
ESGDASIHDTVENLIILANNSLSSNGNVTESGCKECEELEEKNIKEFLQSFVHIVQMFINTA [symbol] [symbol] [symbol]
ITCPPPMSVEHADIWVKSYSLYSRERYICNSGFKRKAGTSSLTECVLNKATNVAHWTTPSLKCIRDPALVHQR
PAPPS
3) Fc-b-GSGPASGRSANAPLGLAGS-IL-15(S162A)-(GGS)5-IL-15Rα/Fc-b-
GSGPASGR/SANAPLGLAGS-IL-15-(GGS)5-IL-15Rα (product from partial cleavage,
active)
Chain 1: Fc-b-GSGPASGRSANAPLGLAGS-IL-15(S162A)-(GGS)5-IL-
15Rα (SEQ ID NO: 213)
                        EPKSSDKTHTCPPCPAPEAAGGPSVFLFPPKPKDTLYITREPEVTCVVVDVSHEDPEVKFNWY
VDGVEVHNAKTKPREEQYNSTYRVVSVLTVLHQDWLNGKEYKCKVSNKALAAPIEKTISKAKGQPREPQVYTLPP
SREEMTKNQVSLTCLVKGFYPSDIAVEWESNGQPENNYKTTPPVLDSDGSFFLYSKLTVDKSRWQQGNVFSCSVM
HEALHNHYTQKSLSLSPGK [symbol] [symbol] NWVNVISDLKKIEDLIQSMHIDATLYTESDVHPSCKV
TAMKCFLLELQVISLESGDASIHDTVENLIILANNSLSSNGNVTESGCKECEELEEKNIKEFLQSFVHIVQMFIN
TA [symbol] [symbol] ITCPPPMSVEHADIWVKSYSLYSRERYICNSGFKRKAGTSSLTECVLNKATNVAHWTT
PSLKCIRDPALVHQRPAPPS
Chain 2: Fc-b-GSGPASGR (SEQ ID NO: 214)
                        EPKSSDKTHTCPPCPAPEAAGGPSVFLFPPKPKDTLYITREPEVTCVVVDVSHEDPEVKFNWY
VDGVEVHNAKTKPREEQYNSTYRVVSVLTVLHQDWLNGKEYKCKVSNKALAAPIEKTISKAKGQPREPQVYTLPP
SREEMTKNQVSLTCLVKGFYPSDIAVEWESNGQPENNYKTTPPVLDSDGSFFLYSKLTVDKSRWQQGNVFSCSVM
HEALHNHYTQKSLSLSPGK [symbol]
Chain 3: SANAPLGLAGS-IL-15-(GGS)5-IL-15Rα (SEQ ID NO: 215) [symbol]
                        SNWVNVISDLKKIEDLIQSMHIDATLYTESDVHPSCKVTAMKCELLELQVISL
ESGDASIHDTVENLIILANNSLSSNGNVTESGCKECEELEEKNIKEFLQSFVHIVQMFINTA [symbol] [symbol]
ITCPPPMSVEHADIWVKSYSLYSRERYICNSGFKRKAGTSSLTECVLNKATNVAHWTTPSLKCIRDPALVHQR
PAPPS
```

[0363] Expected Cleavage Products from Legumain Cleavage of P1343:

```
1) Fc-b-GSGPASGRSAN homodimer (product from complete
cleavage) (SEQ ID NO: 216)
Chains 1 and 2
                        EPKSSDKTHTCPPCPAPEAAGGPSVFLFPPKPKDTLYITREPEVTCVVVDVSHEDPEVKFNWY
VDGVEVHNAKTKPREEQYNSTYRVVSVLTVLHQDWLNGKEYKCKVSNKALAAPIEKTISKAKGQPREPQVYTLPP
SREEMTKNQVSLTCLVKGFYPSDIAVEWESNGQPENNYKTTPPVLDSDGSFFLYSKLTVDKSRWQQGNVFSCSVM
HEALHNHYTQKSLSLSPGK [symbol]
2) APLGLAGS-IL-15-(GGS)5-IL-15Rα homodimer (product from
complete cleavage, active) (SEQ ID NO: 217)
Chains 1 and 2 [symbol]
                  NWVNVISDLKKIEDLIQSMHIDATLYTESDVHPSCKVTAMKCELLELQVISLESG
DASIHDTVENLIILANNSLSSNGNVTESGCKECEELEEKNIKEFLQSFVHIVQMFINTA [symbol] [symbol] I
TCPPPMSVEHADIWVKSYSLYSRERYICNSGFKRKAGTSSLTECVLNKATNVAHWTTPSLKCIRDPALVHQRPAP
PS
3) Fc-b-GSGPASGRSANAPLGLAGS-IL-15(S162A)-(GGS)5-IL-15Rα/Fc-b-
GSGPASGRSAN/APLGLAGS-IL-15-(GGS)5-IL-15Rα (product from partial cleavage,
active)
Chain 1: Fc-b-GSGPASGRSANAPLGLAGS-IL-15(S162A)-(GGS)5-IL-
15Rα (SEQ ID NO: 218)
                        EPKSSDKTHTCPPCPAPEAAGGPSVFLFPPKPKDTLYITREPEVTCVVVDVSHEDPEVKFNWY
VDGVEVHNAKTKPREEQYNSTYRVVSVLTVLHQDWLNGKEYKCKVSNKALAAPIEKTISKAKGQPREPQVYTLPP
SREEMTKNQVSLTCLVKGFYPSDIAVEWESNGQPENNYKTTPPVLDSDGSFFLYSKLTVDKSRWQQGNVFSCSVM
HEALHNHYTQKSLSLSPGK [symbol] [symbol] NWVNVISDLKKIEDLIQSMHIDATLYTESDVHPSCKV
TAMKCFLLELQVISLESGDASIHDTVENLIILANNSLSSNGNVTESGCKECEELEEKNIKEFLQSFVHIVQMFIN
TA [symbol] [symbol] ITCPPPMSVEHADIWVKSYSLYSRERYICNSGFKRKAGTSSLTECVLNKATNVAHWTT
PSLKCIRDPALVHQRPAPPS
Chain 2: Fc-b-GSGPASGRSAN (SEQ ID NO: 219)
                        EPKSSDKTHTCPPCPAPEAAGGPSVFLFPPKPKDTLYITREPEVTCVVVDVSHEDPEVKFNWY
VDGVEVHNAKTKPREEQYNSTYRVVSVLTVLHQDWLNGKEYKCKVSNKALAAPIEKTISKAKGQPREPQVYTLPP
SREEMTKNQVSLTCLVKGFYPSDIAVEWESNGQPENNYKTTPPVLDSDGSFFLYSKLTVDKSRWQQGNVFSCSVM
HEALHNHYTQKSLSLSPGK [symbol]
Chain 3: APLGLAGS-IL-15-(GGS)5-IL-15Ru(SEQ ID NO: 220) [symbol]
                      NWVNVISDLKKIEDLIQSMHIDATLYTESDVHPSCKVTAMKCELLELQVISLESG
DASIHDTVENLIILANNSLSSNGNVTESGCKECEELEEKNIKEFLQSFVHIVQMFINTA [symbol] [symbol] I
TCPPPMSVEHADIWVKSYSLYSRERYICNSGFKRKAGTSSLTECVLNKATNVAHWTTPSLKCIRDPALVHQRPAP
PS
```

[0364] Expected Cleavage Products from MMP-2 or MMP-9 Cleavage of P1343:

```
1) Fc-b-GSGPASGRSAMAPLG homodimer (product from complete
cleavage) (SEQ ID NO: 221)
Chains 1 and 2
                        EPKSSDKTHTCPPCPAPEAAGGPSVFLFPPKPKDTLYITREPEVTCVVVDVSHEDPEVKFNWY
VDGVEVHNAKTKPREEQYNSTYRVVSVLTVLHQDWLNGKEYKCKVSNKALAAPIEKTISKAKGQPREPQVYTLPP
SREEMTKNQVSLTCLVKGFYPSDIAVEWESNGQPENNYKTTPPVLDSDGSFFLYSKLTVDKSRWQQGNVFSCSVM
HEALHNHYTQKSLSLSPGK [symbol] [symbol]
2) LAGS-IL-15-(GGS)5-IL-15Rα homodimer (product from complete
cleavage, active) (SEQ ID NO: 222)
Chains 1 and 2 [symbol]
                        NWVNVISDLKKIEDLIQSMHIDATLYTESDVHPSCKVTAMKCELLELQVISLESGDASI
HDTVENLIILANNSLSSNGNVTESGCKECEELEEKNIKEFLQSFVHIVQMFINTA [symbol] [symbol] ITCPP
PMSVEHADIWVKSYSLYSRERYICNSGFKRKAGTSSLTECVLNKATNVAHWTTPSLKCIRDPALVHQRPAPPS
3) Fc-b-GSGPASGRSANAPLGLAGS-IL-15(S162A)-(GGS)5-IL-15Rα/Fc-b-
GSGPASGRSANAPLG/LAGS-IL-15-(GGS)5-IL-15Rα (product from partial cleavage,
active)
Chain 1: Fc-b-GSGPASGRSANAPLGLAGS-IL-15(S162A)-(GGS)5-IL-
15Rα (SEQ ID NO: 223)
                        EPKSSDKTHTCPPCPAPEAAGGPSVFLFPPKPKDTLYITREPEVTCVVVDVSHEDPEVKFNWY
VDGVEVHNAKTKPREEQYNSTYRVVSVLTVLHQDWLNGKEYKCKVSNKALAAPIEKTISKAKGQPREPQVYTLPP
SREEMTKNQVSLTCLVKGFYPSDIAVEWESNGQPENNYKTTPPVLDSDGSFFLYSKLTVDKSRWQQGNVFSCSVM
HEALHNHYTQKSLSLSPGK [symbol] [symbol] NWVNVISDLKKIEDLIQSMHIDATLYTESDVHPSCKV
TAMKCFLLELQVISLESGDASIHDTVENLIILANNSLSSNGNVTESGCKECEELEEKNIKEFLQSFVHIVQMFIN
TA [symbol] [symbol] ITCPPPMSVEHADIWVKSYSLYSRERYICNSGFKRKAGTSSLTECVLNKATNVAHWTT
PSLKCIRDPALVHQRPAPPS
Chain 2: Fc-b-GSGPASGRSANAPLG (SEQ ID NO: 224)
                        EPKSSDKTHTCPPCPAPEAAGGPSVFLFPPKPKDTLYITREPEVTCVVVDVSHEDPEVKFNWY
VDGVEVHNAKTKPREEQYNSTYRVVSVLTVLHQDWLNGKEYKCKVSNKALAAPIEKTISKAKGQPREPQVYTLPP
SREEMTKNQVSLTCLVKGFYPSDIAVEWESNGQPENNYKTTPPVLDSDGSFFLYSKLTVDKSRWQQGNVFSCSVM
HEALHNHYTQKSLSLSPGK [symbol] [symbol]
Chain 3: LAGS-IL-15-(GGS)5-IL-15Rα (SEQ ID NO: 225) [symbol]
                        NWVNVISDLKKIEDLIQSMHIDATLYTESDVHPSCKVTAMKCELLELQVISLESGDASI
HDTVENLIILANNSLSSNGNVTESGCKECEELEEKNIKEFLQSFVHIVQMFINTA [symbol] [symbol] ITCPP
PMSVEHADIWVKSYSLYSRERYICNSGFKRKAGTSSLTECVLNKATNVAHWTTPSLKCIRDPALVHQRPAPPS
Fc-GSENLYFQGGS-IL-15(L52C)-(GGS)5-IL-15Rα(S40C) (SEQ ID NO:
226)
>P1378_Fc-TEV-L15R_(L:L52C)_(R:S40C) chains 1 and 2
EPKSSDKTHTCPPCPAPELLGGPSVFLFPPKPKDTLMISRTPEVTCVVVDVSHEDPEVKFNWYVDGVEVHNAKTK
PREEQYNSTYRVVSVLTVLHQDWLNGKEYKCKVSNKALPAPIEKTISKAKGQPREPQVYTLPPSREEMTKNQVSL
TCLVKGFYPSDIAVEWESNGQPENNYKTTPPVLDSDGSFFLYSKLTVDKSRWQQGNVFSCSVMHEALHNHYTQKS
LSLSPGK [symbol] NWVNVISDLKKIEDLIQSMHIDATLYTESDVHPSCKVTAMKCFLLELQVISCESGDA
SIHDTVENLIILANNSLSSNGNVTESGCKECEELEEKNIKEFLQSFVHIVQMFINTS [symbol] [symbol] ITC
PPPMSVEHADIWVKSYSLYSRERYICNSGFKRKAGTCSLTECVLNKATNVAHWTTPSLKCIRDPALVHQRPAPPS
```

[0365] Expected Cleavage Products from TEV Cleavage of P1378:

```
1) Fc-GSENLYFQ homodimer (product from complete cleavage)(SEQ
ID NO: 227)
Chains 1 and 2
                        EPKSSDKTHTCPPCPAPELLGGPSVFLFPPKPKDTLMISRTPEVTCVVVDVSHEDPEVKFNWY
VDGVEVHNAKTKPREEQYNSTYRVVSVLTVLHQDWLNGKEYKCKVSNKALPAPIEKTISKAKGQPREPQVYTLPP
SREEMTKNQVSLTCLVKGFYPSDIAVEWESNGQPENNYKTTPPVLDSDGSFFLYSKLTVDKSRWQQGNVFSCSVM
HEALHNHYTQKSLSLSPGK [symbol]
2) GGS-IL-15(L52C)-(GGS)5-IL-15Rα(S40C) homodimer(product from
complete cleavage, active) (SEQ ID NO: 228)
Chains 1 and 2 [symbol]
                        NWVNVISDLKKIEDLIQSMHIDATLYTESDVHPSCKVTAMKCFLLELQVISCESGDASIH
DTVENLIILANNSLSSNGNVTESGCKECEELEEKNIKEFLQSFVHIVQMFINTS [symbol] [symbol] ITCPPP
MSVEHADIWVKSYSLYSRERYICNSGFKRKAGTCSLTECVLNKATNVAHWTTPSLKCIRDPALVHQRPAPPS
3) Fc-GSENLYFQGGS-IL-15(L52C)-(GGS)5-IL-15Rα(S40C)/Fc-GSENLYFQ/
GGS-IL-15(L52C)-(GGS)5-IL-15Rα(S40C) (product from partial cleavage,
active)
Chain 1: Fc-GSENLYFQGGS-IL-15(L52C)-(GGS)5-IL-15Rα(S40C) (SEQ
ID NO: 229)
                        EPKSSDKTHTCPPCPAPELLGGPSVFLFPPKPKDTLMISRTPEVTCVVVDVSHEDPEVKFNWY
VDGVEVHNAKTKPREEQYNSTYRVVSVLTVLHQDWLNGKEYKCKVSNKALPAPIEKTISKAKGQPREPQVYTLPP
SREEMTKNQVSLTCLVKGFYPSDIAVEWESNGQPENNYKTTPPVLDSDGSFFLYSKLTVDKSRWQQGNVFSCSVM
HEALHNHYTQKSLSLSPGK [symbol] NWVNVISDLKKIEDLIQSMHIDATLYTESDVHPSCKVTAMKCELL
ELQVISCESGDASIHDTVENLIILANNSLSSNGNVTESGCKECEELEEKNIKEFLQSFVHIVQMFINTS [symbol] [symbol]
ITCPPPMSVEHADIWVKSYSLYSRERYICNSGFKRKAGTCSLTECVLNKATNVAHWTTPSLKCIRD
PALVHQRPAPPS
Chain 2: Fc-GSENLYFQ (SEQ ID NO: 230)
                        EPKSSDKTHTCPPCPAPELLGGPSVFLFPPKPKDTLMISRTPEVTCVVVDVSHEDPEVKFNWY
VDGVEVHNAKTKPREEQYNSTYRVVSVLTVLHQDWLNGKEYKCKVSNKALPAPIEKTISKAKGQPREPQVYTLPP
SREEMTKNQVSLTCLVKGFYPSDIAVEWESNGQPENNYKTTPPVLDSDGSFFLYSKLTVDKSRWQQGNVFSCSVM
HEALHNHYTQKSLSLSPGK [symbol]
Chain 3: GGS-IL-15(L52C)-(GGS)5-IL-15Rα(S40C) (SEQ ID NO: 231) [symbol]
                        NWVNVISDLKKIEDLIQSMHIDATLYTESDVHPSCKVTAMKCFLLELQVISCESGDASIH
DTVENLIILANNSLSSNGNVTESGCKECEELEEKNIKEFLQSFVHIVQMFINTS [symbol] [symbol] ITCPPP
MSVEHADIWVKSYSLYSRERYICNSGFKRKAGTCSLTECVLNKATNVAHWTTPSLKCIRDPALVHQRPAPPS
SSFc-GSENLYFQGGS-IL-15(L52C)-(GGS)5-IL-15Rα(540C) (SEQ ID NO:
232)
>P1379_SSFc-TEV-L15R_(L:L52C)_(R:S40C) chains 1 and 2
                        EPKSSDKTHTSPPSPAPELLGGPSVFLFPPKPKDTLMISRTPEVTCVVVDVSHEDPEVKFNWY
VDGVEVHNAKTKPREEQYNSTYRVVSVLTVLHQDWLNGKEYKCKVSNKALPAPIEKTISKAKGQPREPQVYTLPP
SREEMTKNQVSLTCLVKGFYPSDIAVEWESNGQPENNYKTTPPVLDSDGSFFLYSKLTVDKSRWQQGNVFSCSVM
HEALHNHYTQKSLSLSPGK [symbol] NWVNVISDLKKIEDLIQSMHIDATLYTESDVHPSCKVTAMKCELL
ELQVISCESGDASIHDTVENLIILANNSLSSNGNVTESGCKECEELEEKNIKEFLQSFVHIVQMFINTS [symbol] [symbol]
ITCPPPMSVEHADIWVKSYSLYSRERYICNSGFKRKAGTCSLTECVLNKATNVAHWTTPSLKCIRD
PALVHQRPAPPS
```

[0366] Expected Cleavage Products from TEV Cleavage of P1379:

```
1) SSFc-GSENLYFQ homodimer (product from complete cleavage) (SEQ
ID NO: 233)
Chains 1 and 2
                        EPKSSDKTHTSPPSPAPELLGGPSVFLFPPKPKDTLMISRTPEVTCVVVDVSHEDPEVKFNWY
VDGVEVHNAKTKPREEQYNSTYRVVSVLTVLHQDWLNGKEYKCKVSNKALPAPIEKTISKAKGQPREPQVYTLPP
SREEMTKNQVSLTCLVKGFYPSDIAVEWESNGQPENNYKTTPPVLDSDGSFFLYSKLTVDKSRWQQGNVFSCSVM
HEALHNHYTQKSLSLSPGK [symbol]
2) GGS-IL-15(L52C)-(GGS)5-IL-15Rα(S40C) homodimer (product from
complete cleavage, active) (SEQ ID NO: 234)
Chains 1 and 2 [symbol]
                        NWVNVISDLKKIEDLIQSMHIDATLYTESDVHPSCKVTAMKCFLLELQVISCESGDASIH
DTVENLIILANNSLSSNGNVTESGCKECEELEEKNIKEFLQSFVHIVQMFINTS [symbol] [symbol] ITCPPP
MSVEHADIWVKSYSLYSRERYICNSGFKRKAGTCSLTECVLNKATNVAHWTTPSLKCIRDPALVHQRPAPPS
3) SSFc-GSENLYFQGGS-IL-15(L52C)-(GGS)5-IL-15Rα(S40C)/SSFc-
GSENLYFQ/GGS-IL-15(L52C)-(GGS)5-IL-15Rα(S40C) (product from partial
cleavage, active)
Chain 1: SSFc-GSENLYFQGGS-IL-15(L52C)-(GGS)5-IL-15Rα(540C) (SEQ
ID NO: 235)
                        EPKSSDKTHTSPPSPAPELLGGPSVFLFPPKPKDTLMISRTPEVTCVVVDVSHEDPEVKFNWY
VDGVEVHNAKTKPREEQYNSTYRVVSVLTVLHQDWLNGKEYKCKVSNKALPAPIEKTISKAKGQPREPQVYTLPP
SREEMTKNQVSLTCLVKGFYPSDIAVEWESNGQPENNYKTTPPVLDSDGSFFLYSKLTVDKSRWQQGNVFSCSVM
HEALHNHYTQKSLSLSPGK [symbol] NWVNVISDLKKIEDLIQSMHIDATLYTESDVHPSCKVTAMKCELL
ELQVISCESGDASIHDTVENLIILANNSLSSNGNVTESGCKECEELEEKNIKEFLQSFVHIVQMFINTS [symbol] [symbol]
ITCPPPMSVEHADIWVKSYSLYSRERYICNSGFKRKAGTCSLTECVLNKATNVAHWTTPSLKCIRD
PALVHQRPAPPS
Chain 2: SSFc-GSENLYFQ (SEQ ID NO: 236)
                        EPKSSDKTHTSPPSPAPELLGGPSVFLFPPKPKDTLMISRTPEVTCVVVDVSHEDPEVKFNWY
VDGVEVHNAKTKPREEQYNSTYRVVSVLTVLHQDWLNGKEYKCKVSNKALPAPIEKTISKAKGQPREPQVYTLPP
SREEMTKNQVSLTCLVKGFYPSDIAVEWESNGQPENNYKTTPPVLDSDGSFFLYSKLTVDKSRWQQGNVFSCSVM
HEALHNHYTQKSLSLSPGK [symbol]
Chain 3: GGS-IL-15(L52C)-(GGS)5-IL-15Rα(S40C) (SEQ ID NO: 237) [symbol]
                        NWVNVISDLKKIEDLIQSMHIDATLYTESDVHPSCKVTAMKCFLLELQVISCESGDASIH
DTVENLIILANNSLSSNGNVTESGCKECEELEEKNIKEFLQSFVHIVQMFINTS [symbol] [symbol] GGSITCPPP
MSVEHADIWVKSYSLYSRERYICNSGFKRKAGTCSLTECVLNKATNVAHWTTPSLKCIRDPALVHQRPAPPS
Fc-b-PLGLSGRSANAGPA-IL-15(S162A, L52C)-(GGS)5-IL-15Rα(S40C) (SEQ
ID NO: 238)
>P1380_Fc-b-PS4-L15R-S162A_(L:L52C)_(R:S40C) chains 1 and 2
EPKSSDKTHTCPPCPAPEAAGGPSVFLFPPKPKDTLYITREPEVTCVVVDVSHEDPEVKFNWYVDGVEVHNAKTK
PREEQYNSTYRVVSVLTVLHQDWLNGKEYKCKVSNKALAAPIEKTISKAKGQPREPQVYTLPPSREEMTKNQVSL
TCLVKGFYPSDIAVEWESNGQPENNYKTTPPVLDSDGSFFLYSKLTVDKSRWQQGNVFSCSVMHEALHNHYTQKS
LSLSPGK [symbol] [symbol] NWVNVISDLKKIEDLIQSMHIDATLYTESDVHPSCKVTAMKCELLELQVISCES
GDASIHDTVENLIILANNSLSSNGNVTESGCKECEELEEKNIKEFLQSFVHIVQMFINTA [symbol] [symbol]
ITCPPPMSVEHADIWVKSYSLYSRERYICNSGFKRKAGTCSLTECVLNKATNVAHWTTPSLKCIRDPALVHQRPA
PPS
```

[0367] Expected Cleavage Products from uPA or Matriptase Cleavage of P1300;

```
1) Fc-b-PLGLSGR homodimer (product from complete cleavage)(SEQ
ID NO: 239)
Chains 1 and 2
                        EPKSSDKTHTCPPCPAPEAAGGPSVFLFPPKPKDTLYITREPEVTCVVVDVSHEDPEVKFNWY
VDGVEVHNAKTKPREEQYNSTYRVVSVLTVLHQDWLNGKEYKCKVSNKALAAPIEKTISKAKGQPREPQVYTLPP
SREEMTKNQVSLTCLVKGFYPSDIAVEWESNGQPENNYKTTPPVLDSDGSFFLYSKLTVDKSRWQQGNVFSCSVM
HEALHNHYTQKSLSLSPGK [symbol]
2) SANAGPA-IL-15(S162A, L52C)-(GGS)5-IL-15Rα(540C)
homodimer (product from complete cleavage, active) (SEQ ID NO: 240)
Chains 1 and 2 [symbol]
                        NWVNVISDLKKIEDLIQSMHIDATLYTESDVHPSCKVTAMKCFLLELQVISCESGD
ASIHDTVENLIILANNSLSSNGNVTESGCKECEELEEKNIKEFLQSFVHIVQMFINTA [symbol] [symbol] IT
CPPPMSVEHADIWVKSYSLYSRERYICNSGFKRKAGTCSLTECVLNKATNVAHWTTPSLKCIRDPALVHQRPAPP
S
3) Fc-b-PLGLSGRSANAGPA-IL-15(S162A, L52C)-(GGS)5-IL-
15Rα(S40C)/Fc-b-PLGLSGR/SANAGPA-IL-15(S162A, L52C)-(GGS)5-IL-15Rα(S40C)
(product from partial cleavage, active)
Chain 1: Fc-b-PLGLSGRSANAGPA-IL-15(S162A, L52C)-(GGS)5-IL-
15Rα(S40C) (SEQ ID NO: 241)
                        EPKSSDKTHTCPPCPAPEAAGGPSVFLFPPKPKDTLYITREPEVTCVVVDVSHEDPEVKFNWY
VDGVEVHNAKTKPREEQYNSTYRVVSVLTVLHQDWLNGKEYKCKVSNKALAAPIEKTISKAKGQPREPQVYTLPP
SREEMTKNQVSLTCLVKGFYPSDIAVEWESNGQPENNYKTTPPVLDSDGSFFLYSKLTVDKSRWQQGNVFSCSVM
HEALHNHYTQKSLSLSPGK [symbol] [symbol] NWVNVISDLKKIEDLIQSMHIDATLYTESDVHPSCKVTAMKC
FLLELQVISCESGDASIHDTVENLIILANNSLSSNGNVTESGCKECEELEEKNIKEFLQSFVHIVQMFINTA [symbol] [symbol]
ITCPPPMSVEHADIWVKSYSLYSRERYICNSGFKRKAGTCSLTECVLNKATNVAHWTTPSLKC
IRDPALVHQRPAPPS
Chain 2: Fc-b-PLGLSGR (SEQ ID NO: 242)
                        EPKSSDKTHTCPPCPAPEAAGGPSVFLFPPKPKDTLYITREPEVTCVVVDVSHEDPEVKFNWY
VDGVEVHNAKTKPREEQYNSTYRVVSVLTVLHQDWLNGKEYKCKVSNKALAAPIEKTISKAKGQPREPQVYTLPP
SREEMTKNQVSLTCLVKGFYPSDIAVEWESNGQPENNYKTTPPVLDSDGSFFLYSKLTVDKSRWQQGNVFSCSVM
HEALHNHYTQKSLSLSPGK [symbol]
Chain 3: SANAGPA-IL-15(S162A, L52C)-(GGS)5-IL-15Rα(S40C) (SEQ ID
NO: 243) [symbol]
                        NWVNVISDLKKIEDLIQSMHIDATLYTESDVHPSCKVTAMKCFLLELQVISCESGD
ASIHDTVENLIILANNSLSSNGNVTESGCKECEELEEKNIKEFLQSFVHIVQMFINTA [symbol] [symbol] IT
CPPPMSVEHADIWVKSYSLYSRERYICNSGFKRKAGTCSLTECVLNKATNVAHWTTPSLKCIRDPALVHQRPAPP
S
```

[0368] Expected Cleavage Products from Legumain Cleavage of P1380:

```
1) Fc-b-PLGLSGRSAN homodimer (product from complete
cleavage) (SEQ ID NO: 244)
Chains 1 and 2
                        EPKSSDKTHTCPPCPAPEAAGGPSVFLFPPKPKDTLYITREPEVTCVVVDVSHEDPEVKFNWY
VDGVEVHNAKTKPREEQYNSTYRVVSVLTVLHQDWLNGKEYKCKVSNKALAAPIEKTISKAKGQPREPQVYTLPP
SREEMTKNQVSLTCLVKGFYPSDIAVEWESNGQPENNYKTTPPVLDSDGSFFLYSKLTVDKSRWQQGNVFSCSVM
HEALHNHYTQKSLSLSPGK [symbol]
2) AGPA-IL-15(S162A, L52C)-(GGS)5-IL-15Rα(S40C)
homodimer (product from complete cleavage, active) (SEQ ID NO: 245)
Chains 1 and 2 [symbol]
                        NWVNVISDLKKIEDLIQSMHIDATLYTESDVHPSCKVTAMKCFLLELQVISCESGDASI
HDTVENLIILANNSLSSNGNVTESGCKECEELEEKNIKEFLQSFVHIVQMFINTA [symbol] [symbol] ITCPP
PMSVEHADIWVKSYSLYSRERYICNSGFKRKAGTCSLTECVLNKATNVAHWTTPSLKCIRDPALVHQRPAPPS
3) Fc-b-PLGLSGRSANAGPA-IL-15(S162A, L52C)-(GGS)5-IL-15Rα(S40C)/
Fc-b-PLGLSGRSAN/AGPA-IL-15(S162A, L52C)-(GGS)5-IL-15Rα(S40C) (product from
partial cleavage, active)
Chain 1: Fc-b-PLGLSGRSANAGPA-IL-15(S162A, L52C)-(GGS)5-IL-
15Rα(S40C) (SEQ ID NO: 246)
                        EPKSSDKTHTCPPCPAPEAAGGPSVFLFPPKPKDTLYITREPEVTCVVVDVSHEDPEVKFNWY
VDGVEVHNAKTKPREEQYNSTYRVVSVLTVLHQDWLNGKEYKCKVSNKALAAPIEKTISKAKGQPREPQVYTLPP
SREEMTKNQVSLTCLVKGFYPSDIAVEWESNGQPENNYKTTPPVLDSDGSFFLYSKLTVDKSRWQQGNVFSCSVM
HEALHNHYTQKSLSLSPGK [symbol] [symbol] NWVNVISDLKKIEDLIQSMHIDATLYTESDVHPSCKVTAMKC
FLLELQVISCESGDASIHDTVENLIILANNSLSSNGNVTESGCKECEELEEKNIKEFLQSFVHIVQMFINTA [symbol] [symbol]
ITCPPPMSVEHADIWVKSYSLYSRERYICNSGFKRKAGTCSLTECVLNKATNVAHWTTPSLKC
IRDPALVHQRPAPPS
Chain 2: Fc-b-PLGLSGRSAN (SEQ ID NO: 247)
                        EPKSSDKTHTCPPCPAPEAAGGPSVFLFPPKPKDTLYITREPEVTCVVVDVSHEDPEVKFNWY
VDGVEVHNAKTKPREEQYNSTYRVVSVLTVLHQDWLNGKEYKCKVSNKALAAPIEKTISKAKGQPREPQVYTLPP
SREEMTKNQVSLTCLVKGFYPSDIAVEWESNGQPENNYKTTPPVLDSDGSFFLYSKLTVDKSRWQQGNVFSCSVM
HEALHNHYTQKSLSLSPGK [symbol]
Chain 3: AGPA-IL-15(S162A, L52C)-(GGS)5-IL-15Rα(S40C) (SEQ ID
NO: 248) [symbol]
                        NWVNVISDLKKIEDLIQSMHIDATLYTESDVHPSCKVTAMKCELLELQVISCESGDASI
HDTVENLIILANNSLSSNGNVTESGCKECEELEEKNIKEFLQSFVHIVQMFINTA [symbol] [symbol] ITCPP
PMSVEHADIWVKSYSLYSRERYICNSGEKRKAGICSLTECVLNKATNVAHWTTPSLKCIRDPALVHQRPAPPS
```

[0369] Expected Cleavage Products from MMP-2 or MMP-9 Cleavage of P1380:

```
1) Fc-b-PLG homodimer (product from complete cleavage) (SEQ ID
NO: 249)
Chains 1 and 2
                        EPKSSDKTHTCPPCPAPEAAGGPSVFLFPPKPKDTLYITREPEVTCVVVDVSHEDPEVKFNWY
VDGVEVHNAKTKPREEQYNSTYRVVSVLTVLHQDWLNGKEYKCKVSNKALAAPIEKTISKAKGQPREPQVYTLPP
SREEMTKNQVSLTCLVKGFYPSDIAVEWESNGQPENNYKTTPPVLDSDGSFFLYSKLTVDKSRWQQGNVFSCSVM
HEALHNHYTQKSLSLSPGK [symbol]
2) LSGRSANAGPA-IL-15(S162A, L52C)-(GGS)5-IL-15Rα(S40C)
homodimer (product from complete cleavage, active) (SEQ ID NO: 250)
Chains 1 and 2 [symbol]
                        NWVNVISDLKKIEDLIQSMHIDATLYTESDVHPSCKVTAMKCFLLELQVISC
ESGDASIHDTVENLIILANNSLSSNGNVTESGCKECEELEEKNIKEFLQSFVHIVQMFINTA [symbol] [symbol]
ITCPPPMSVEHADIWVKSYSLYSRERYICNSGFKRKAGTCSLTECVLNKATNVAHWTTPSLKCIRDPALVHQR
PAPPS
3) Fc-b-PLGLSGRSANAGPA-IL-15(S162A, L52C)-(GGS)5-IL-
15Rα(S40C)/Fc-b-PLG/LSGRSANAGPA-IL-15(S162A, L52C)-(GGS)5-IL-15Rα(S40C)
(product from partial cleavage, active)
Chain 1: Fc-b-PLGLSGRSANAGPA-IL-15(S162A, L52C)-(GGS)5-IL-
15Rα(S40C) (SEQ ID NO: 251)
                        EPKSSDKTHTCPPCPAPEAAGGPSVFLFPPKPKDTLYITREPEVTCVVVDVSHEDPEVKFNWY
VDGVEVHNAKTKPREEQYNSTYRVVSVLTVLHQDWLNGKEYKCKVSNKALAAPIEKTISKAKGQPREPQVYTLPP
SREEMTKNQVSLTCLVKGFYPSDIAVEWESNGQPENNYKTTPPVLDSDGSFFLYSKLTVDKSRWQQGNVFSCSVM
HEALHNHYTQKSLSLSPGK [symbol] [symbol] NWVNVISDLKKIEDLIQSMHIDATLYTESDVHPSCKVTAMKC
FLLELQVISCESGDASIHDTVENLIILANNSLSSNGNVTESGCKECEELEEKNIKEFLQSFVHIVQMFINTA [symbol] [symbol]
ITCPPPMSVEHADIWVKSYSLYSRERYICNSGFKRKAGTCSLTECVLNKATNVAHWTTPSLKC
IRDPALVHQRPAPPS
Chain 2: Fc-b-PLG (SEQ ID NO: 252)
                        EPKSSDKTHTCPPCPAPEAAGGPSVFLFPPKPKDTLYITREPEVTCVVVDVSHEDPEVKFNWY
VDGVEVHNAKTKPREEQYNSTYRVVSVLTVLHQDWLNGKEYKCKVSNKALAAPIEKTISKAKGQPREPQVYTLPP
SREEMTKNQVSLTCLVKGFYPSDIAVEWESNGQPENNYKTTPPVLDSDGSFFLYSKLTVDKSRWQQGNVFSCSVM
HEALHNHYTQKSLSLSPGK [symbol]
Chain 3: LSGRSANAGPA-IL-15(S162A, L52C)-(GGS)5-IL-15Rα(S40C)
(SEQ ID NO: 253) [symbol]
                        NWVNVISDLKKIEDLIQSMHIDATLYTESDVHPSCKVTAMKCELLELQVISC
ESGDASIHDTVENLIILANNSLSSNGNVTESGCKECEELEEKNIKEFLQSFVHIVQMFINTA [symbol] [symbol]
ITCPPPMSVEHADIWVKSYSLYSRERYICNSGFKRKAGTCSLTECVLNKATNVAHWTTPSLKCIRDPALVHQR
PAPPS
SSFc-b-PLGLSGRSANAGPA-IL-15(S162A, L52C)-(GGS)5-IL-15Rα(S40C)
(SEQ ID NO: 254)
>P1381_SSFc-b-PS4-L15R-S162A_(L:L52C)_(R:S40C) chains 1 and 2
EPKSSDKTHTSPPSPAPEAAGGPSVFLFPPKPKDTLYITREPEVTCVVVDVSHEDPEVKFNWYVDGVEVHNAKTK
PREEQYNSTYRVVSVLTVLHQDWLNGKEYKCKVSNKALAAPIEKTISKAKGQPREPQVYTLPPSREEMTKNQVSL
TCLVKGFYPSDIAVEWESNGQPENNYKTTPPVLDSDGSFFLYSKLTVDKSRWQQGNVFSCSVMHEALHNHYTQKS
LSLSPGK [symbol] [symbol] NWVNVISDLKKIEDLIQSMHIDATLYTESDVHPSCKVTAMKCELLELQVISCES
GDASIHDTVENLIILANNSLSSNGNVTESGCKECEELEEKNIKEFLQSFVHIVQMFINTA [symbol] [symbol]
ITCPPPMSVEHADIWVKSYSLYSRERYICNSGFKRKAGTCSLTECVLNKATNVAHWTTPSLKCIRDPALVHQRPA
PPS
```

[0370] Expected Cleavage Products from uPA or Matriptase Cleavage of P1381:

```
1) SSFc-b-PLGLSGR homodimer (product from complete
cleavage) (SEQ ID NO: 255)
Chains 1 and 2
                        EPKSSDKTHTSPPSPAPEAAGGPSVFLFPPKPKDTLYITREPEVTCVVVDVSHEDPEVKFNWY
VDGVEVHNAKTKPREEQYNSTYRVVSVLTVLHQDWLNGKEYKCKVSNKALAAPIEKTISKAKGQPREPQVYTLPP
SREEMTKNQVSLTCLVKGFYPSDIAVEWESNGQPENNYKTTPPVLDSDGSFFLYSKLTVDKSRWQQGNVFSCSVM
HEALHNHYTQKSLSLSPGK [symbol]
2) SANAGPA-IL-15(S162A, L52C)-(GGS)5-IL-15Rα(S40C)
homodimer (product from complete cleavage, active) (SEQ ID NO: 256)
Chains 1 and 2 [symbol]
                        NWVNVISDLKKIEDLIQSMHIDATLYTESDVHPSCKVTAMKCELLELQVISCESGD
ASIHDTVENLIILANNSLSSNGNVTESGCKECEELEEKNIKEFLQSFVHIVQMFINTA [symbol] [symbol] IT
CPPPMSVEHADIWVKSYSLYSRERYICNSGFKRKAGTCSLTECVLNKATNVAHWTTPSLKCIRDPALVHQRPAPP
S
3) SSFc-b-PLGLSGRSANAGPA-IL-15(S162A, L52C)-(GGS)5-IL-
15Rα(S40C)/SSFc-b-PLGLSGR/SANAGPA-IL-15(S162A, L52C)-(GGS)5-IL-15Rα(S40C)
(product from partial cleavage, active)
Chain 1: SSFc-b-PLGLSGRSANAGPA-IL-15(S162A, L52C)-(GGS)5-IL-
15Rα(S40C) (SEQ ID NO: 257)
                        EPKSSDKTHTSPPSPAPEAAGGPSVFLFPPKPKDTLYITREPEVTCVVVDVSHEDPEVKFNWY
VDGVEVHNAKTKPREEQYNSTYRVVSVLTVLHQDWLNGKEYKCKVSNKALAAPIEKTISKAKGQPREPQVYTLPP
SREEMTKNQVSLTCLVKGFYPSDIAVEWESNGQPENNYKTTPPVLDSDGSFFLYSKLTVDKSRWQQGNVFSCSVM
HEALHNHYTQKSLSLSPGK [symbol] [symbol] NWVNVISDLKKIEDLIQSMHIDATLYTESDVHPSCKVTAMKC
FLLELQVISCESGDASIHDTVENLIILANNSLSSNGNVTESGCKECEELEEKNIKEFLQSFVHIVQMFINTA [symbol] [symbol]
ITCPPPMSVEHADIWVKSYSLYSRERYICNSGFKRKAGTCSLTECVLNKATNVAHWTTPSLKC
IRDPALVHQRPAPPS
Chain 2: SSFc-b-PLGLSGR (SEQ ID NO: 26058)
                        EPKSSDKTHTSPPSPAPEAAGGPSVFLFPPKPKDTLYITREPEVTCVVVDVSHEDPEVKFNWY
VDGVEVHNAKTKPREEQYNSTYRVVSVLTVLHQDWLNGKEYKCKVSNKALAAPIEKTISKAKGQPREPQVYTLPP
SREEMTKNQVSLTCLVKGFYPSDIAVEWESNGQPENNYKTTPPVLDSDGSFFLYSKLTVDKSRWQQGNVFSCSVM
HEALHNHYTQKSLSLSPGK [symbol]
Chain 3: SANAGPA-IL-15(S162A, L52C)-(GGS)5-IL-15Rα(S40C) (SEQ
ID NO: 259) [symbol]
                        NWVNVISDLKKIEDLIQSMHIDATLYTESDVHPSCKVTAMKCELLELQVISCESGD
ASIHDTVENLIILANNSLSSNGNVTESGCKECEELEEKNIKEFLQSFVHIVQMFINTA [symbol] [symbol] IT
CPPPMSVEHADIWVKSYSLYSRERYICNSGFKRKAGTCSLTECVLNKATNVAHWTTPSLKCIRDPALVHQRPAPP
S
```

[0371] Expected Cleavage Products from Legumain Cleavage of P1381:

```
1) SSFc-b-PLGLSGRSAN homodimer (product from complete
cleavage) (SEQ ID NO: 260)
Chains 1 and 2
                        EPKSSDKTHTSPPSPAPEAAGGPSVFLFPPKPKDTLYITREPEVTCVVVDVSHEDPEVKFNWY
VDGVEVHNAKTKPREEQYNSTYRVVSVLTVLHQDWLNGKEYKCKVSNKALAAPIEKTISKAKGQPREPQVYTLPP
SREEMTKNQVSLTCLVKGFYPSDIAVEWESNGQPENNYKTTPPVLDSDGSFFLYSKLTVDKSRWQQGNVFSCSVM
HEALHNHYTQKSLSLSPGK [symbol]
2) AGPA-IL-15(S162A, L52C)-(GGS)5-IL-15Rα(S40C)
homodimer (product from complete cleavage, active) (SEQ ID NO: 261)
Chains 1 and 2 [symbol]
                        NWVNVISDLKKIEDLIQSMHIDATLYTESDVHPSCKVTAMKCFLLELQVISCESGDASI
HDTVENLIILANNSLSSNGNVTESGCKECEELEEKNIKEFLQSFVHIVQMFINTA [symbol] [symbol] ITCPP
PMSVEHADIWVKSYSLYSRERYICNSGFKRKAGTCSLTECVLNKATNVAHWTTPSLKCIRDPALVHQRPAPPS
3) SSFc-b-PLGLSGRSANAGPA-IL-15(S162A, L52C)-(GGS)5-IL-
15Rα(S40C)/SSFc-b-PLGLSGRSAN/AGPA-IL-15(S162A, L52C)-(GGS)5-IL-15Rα(S40C)
(product from partial cleavage, active)
Chain 1: SSFc-b-PLGLSGRSANAGPA-IL-15(S162A, L52C)-(GGS)5-IL-
15Rα(540C) (SEQ ID NO: 262)
                        EPKSSDKTHTSPPSPAPEAAGGPSVFLFPPKPKDTLYITREPEVTCVVVDVSHEDPEVKFNWY
VDGVEVHNAKTKPREEQYNSTYRVVSVLTVLHQDWLNGKEYKCKVSNKALAAPIEKTISKAKGQPREPQVYTLPP
SREEMTKNQVSLTCLVKGFYPSDIAVEWESNGQPENNYKTTPPVLDSDGSFFLYSKLTVDKSRWQQGNVFSCSVM
HEALHNHYTQKSLSLSPGKPLGLSGRSANAGPANWVNVISDLKKIEDLIQSMHIDATLYTESDVHPSCKVTAMKC
FLLELQVISCESGDASIHDTVENLIILANNSLSSNGNVTESGCKECEELEEKNIKEFLQSFVHIVQMFINTA [symbol] [symbol]
ITCPPPMSVEHADIWVKSYSLYSRERYICNSGFKRKAGTCSLTECVLNKATNVAHWTTPSLKC
IRDPALVHQRPAPPS
Chain 2: SSFc-b-PLGLSGRSAN (SEQ ID NO: 263)
                        EPKSSDKTHTSPPSPAPEAAGGPSVFLFPPKPKDTLYITREPEVTCVVVDVSHEDPEVKFNWY
VDGVEVHNAKTKPREEQYNSTYRVVSVLTVLHQDWLNGKEYKCKVSNKALAAPIEKTISKAKGQPREPQVYTLPP
SREEMTKNQVSLTCLVKGFYPSDIAVEWESNGQPENNYKTTPPVLDSDGSFFLYSKLTVDKSRWQQGNVFSCSVM
HEALHNHYTQKSLSLSPGK [symbol]
Chain 3: AGPA-IL-15(S162A, L52C)-(GGS)5-IL-15Rα(S40C) (SEQ ID
NO: 264) [symbol]
                        NWVNVISDLKKIEDLIQSMHIDATLYTESDVHPSCKVTAMKCFLLELQVISCESGDASI
HDTVENLIILANNSLSSNGNVTESGCKECEELEEKNIKEFLQSFVHIVQMFINTA [symbol] [symbol] ITCPP
PMSVEHADIWVKSYSLYSRERYICNSGFKRKAGTCSLTECVLNKATNVAHWTTPSLKCIRDPALVHQRPAPPS
```

[0372] Expected Cleavage Products from MMP-2 or MMP-9 Cleavage of P1381:

1) SSFc-b-PLG homodimer (product from complete cleavage) (SEQ ID
NO: 265)
Chains 1 and 2
EPKSSDKTHTSPPSPAPEAAGGPSVFLFPPKPKDTLYITREPEVTCVVVDVSHEDPEVKFNWY
VDGVEVHNAKTKPREEQYNSTYRVVSVLTVLHQDWLNGKEYKCKVSNKALAAPIEKTISKAKGQPREPQVYTLPP
SREEMTKNQVSLTCLVKGFYPSDIAVEWESNGQPENNYKTTPPVLDSDGSFFLYSKLTVDKSRWQQGNVFSCSVM
HEALHNHYTQKSLSLSPGK [symbol]
2) LSGRSANAGPA-IL-15(S162A, L52C)-(GGS)5-IL-15Rα(S40C)
homodimer (product from complete cleavage, active) (SEQ ID NO: 266)
Chains 1 and 2 [symbol]
NWVNVISDLKKIEDLIQSMHIDATLYTESDVHPSCKVTAMKCELLELQVISC
ESGDASIHDTVENLIILANNSLSSNGNVTESGCKECEELEEKNIKEFLQSFVHIVQMFINTA [symbol] [symbol]
ITCPPPMSVEHADIWVKSYSLYSRERYICNSGFKRKAGTCSLTECVLNKATNVAHWTTPSLKCIRDPALVHQR
PAPPS
3) SSFc-b-PLGLSGRSANAGPA-IL-15(S162A, L52C)-(GGS)5-IL-
15Rα(S40C)/SSFc-b-PLG/LSGRSANAGPA-IL-15(S162A, L52C)-(GGS)5-IL-15Rα(S40C)
(product from partial cleavage, active)
Chain 1: SSFc-b-PLGLSGRSANAGPA-IL-15(S162A, L52C)-(GGS)5-IL-
15Rα(S40C) (SEQ ID NO: 267)
EPKSSDKTHTSPPSPAPEAAGGPSVFLFPPKPKDTLYITREPEVTCVVVDVSHEDPEVKFNWY
VDGVEVHNAKTKPREEQYNSTYRVVSVLTVLHQDWLNGKEYKCKVSNKALAAPIEKTISKAKGQPREPQVYTLPP
SREEMTKNQVSLTCLVKGFYPSDIAVEWESNGQPENNYKTTPPVLDSDGSFFLYSKLTVDKSRWQQGNVFSCSVM
HEALHNHYTQKSLSLSPGK [symbol] [symbol] NWVNVISDLKKIEDLIQSMHIDATLYTESDVHPSCKVTAMKC
FLLELQVISCESGDASIHDTVENLIILANNSLSSNGNVTESGCKECEELEEKNIKEFLQSFVHIVQMFINTA [symbol] [symbol]
ITCPPPMSVEHADIWVKSYSLYSRERYICNSGFKRKAGTCSLTECVLNKATNVAHWTTPSLKC
IRDPALVHQRPAPPS
Chain 2: SSFc-b-PLG (SEQ ID NO: 268)
EPKSSDKTHTSPPSPAPEAAGGPSVFLFPPKPKDTLYITREPEVTCVVVDVSHEDPEVKFNWY
VDGVEVHNAKTKPREEQYNSTYRVVSVLTVLHQDWLNGKEYKCKVSNKALAAPIEKTISKAKGQPREPQVYTLPP
SREEMTKNQVSLTCLVKGFYPSDIAVEWESNGQPENNYKTTPPVLDSDGSFFLYSKLTVDKSRWQQGNVFSCSVM
HEALHNHYTQKSLSLSPGK [symbol]
Chain 3: LSGRSANAGPA-IL-15(S162A, L52C)-(GGS)5-IL-15Rα(S40C)
(SEQ ID NO: 269) [symbol]
NWVNVISDLKKIEDLIQSMHIDATLYTESDVHPSCKVTAMKCELLELQVISC
ESGDASIHDTVENLIILANNSLSSNGNVTESGCKECEELEEKNIKEFLQSFVHIVQMFINTA [symbol] [symbol] [symbol]
ITCPPPMSVEHADIWVKSYSLYSRERYICNSGFKRKAGTCSLTECVLNKATNVAHWTTPSLKCIRDPALVHQR
PAPPS
Fc-b-PLGLSGRSANAG-IL-15(S162A, L52C)-(GGS)5-IL-15Rα(S40C) (SEQ
ID NO: 270)
>P1382_Fc-b-PS4-L15R-S162A_(L:L52C)_(R:S40C) (PLGLSGRSANAGPA →
PLGLSGRSANAG) chains 1 and 2
EPKSSDKTHTCPPCPAPEAAGGPSVFLFPPKPKDTLYITREPEVTCVVVDVSHEDPEVKFNWYVDGVEVHNAKTK
PREEQYNSTYRVVSVLTVLHQDWLNGKEYKCKVSNKALAAPIEKTISKAKGQPREPQVYTLPPSREEMTKNQVSL
TCLVKGFYPSDIAVEWESNGQPENNYKTTPPVLDSDGSFFLYSKLTVDKSRWQQGNVFSCSVMHEALHNHYTQKS
LSLSPGK [symbol] NWVNVISDLKKIEDLIQSMHIDATLYTESDVHPSCKVTAMKCELLELQVISCESGD
ASIHDTVENLIILANNSLSSNGNVTESGCKECEELEEKNIKEFLQSFVHIVQMFINTA [symbol] [symbol] IT
CPPPMSVEHADIWVKSYSLYSRERYICNSGFKRKAGTCSLTECVLNKATNVAHWTTPSLKCIRDPALVHQRPAPP
S

[0373] Expected Cleavage Products from uPA or Matriptase Cleavage of P1382:

1) Fc-b-PLGLSGR homodimer (product from complete cleavage) (SEQ
ID NO: 271)
Chains 1 and 2
EPKSSDKTHTCPPCPAPEAAGGPSVFLFPPKPKDTLYITREPEVTCVVVDVSHEDPEVKFNWY
VDGVEVHNAKTKPREEQYNSTYRVVSVLTVLHQDWLNGKEYKCKVSNKALAAPIEKTISKAKGQPREPQVYTLPP
SREEMTKNQVSLTCLVKGFYPSDIAVEWESNGQPENNYKTTPPVLDSDGSFFLYSKLTVDKSRWQQGNVFSCSVM
HEALHNHYTQKSLSLSPGK [symbol]
2) SANAG-IL-15(S162A, L52C)-(GGS)5-IL-15Rα(S40C)
homodimer(product from complete cleavage, active) (SEQ ID NO: 272)
Chains 1 and 2 [symbol]
NWVNVISDLKKIEDLIQSMHIDATLYTESDVHPSCKVTAMKCELLELQVISCESGDAS
IHDTVENLIILANNSLSSNGNVTESGCKECEELEEKNIKEFLQSFVHIVQMFINTA [symbol] [symbol] ITCP
PPMSVEHADIWVKSYSLYSRERYICNSGFKRKAGTCSLTECVLNKATNVAHWTTPSLKCIRDPALVHQRPAPPS
3) Fc-b-PLGLSGRSANAG-IL-15(S162A, L52C)-(GGS)5-IL-
15Rα(S40C)/Fc-b-PLGLSGR/SANAG-IL-15(S162A, L52C)-(GGS)5-IL-15Rα(S40C)
(product from partial cleavage, active)
Chain 1: Fc-b-PLGLSGRSANAG-IL-15(S162A, L52C)-(GGS)5-IL-
15Rα(S40C) (SEQ ID NO: 273)
EPKSSDKTHTCPPCPAPEAAGGPSVFLFPPKPKDTLYITREPEVTCVVVDVSHEDPEVKFNWY
VDGVEVHNAKTKPREEQYNSTYRVVSVLTVLHQDWLNGKEYKCKVSNKALAAPIEKTISKAKGQPREPQVYTLPP
SREEMTKNQVSLTCLVKGFYPSDIAVEWESNGQPENNYKTTPPVLDSDGSFFLYSKLTVDKSRWQQGNVFSCSVM
HEALHNHYTQKSLSLSPGK [symbol] NWVNVISDLKKIEDLIQSMHIDATLYTESDVHPSCKVTAMKCFL
LELQVISCESGDASIHDTVENLIILANNSLSSNGNVTESGCKECEELEEKNIKEFLQSFVHIVQMFINTA [symbol] [symbol]
ITCPPPMSVEHADIWVKSYSLYSRERYICNSGFKRKAGTCSLTECVLNKATNVAHWTTPSLKCIR
DPALVHQRPAPPS
Chain 2: Fc-b-PLGLSGR (SEQ ID NO: 274)
EPKSSDKTHTCPPCPAPEAAGGPSVFLFPPKPKDTLYITREPEVTCVVVDVSHEDPEVKFNWY
VDGVEVHNAKTKPREEQYNSTYRVVSVLTVLHQDWLNGKEYKCKVSNKALAAPIEKTISKAKGQPREPQVYTLPP
SREEMTKNQVSLTCLVKGFYPSDIAVEWESNGQPENNYKTTPPVLDSDGSFFLYSKLTVDKSRWQQGNVFSCSVM
HEALHNHYTQKSLSLSPGK [symbol]
Chain 3: SANAG-IL-15(S162A, L52C)-(GGS)5-IL-15Rα(S40C) (SEQ ID
NO: 275) [symbol]
NWVNVISDLKKIEDLIQSMHIDATLYTESDVHPSCKVTAMKCELLELQVISCESGDAS
IHDTVENLIILANNSLSSNGNVTESGCKECEELEEKNIKEFLQSFVHIVQMFINTA [symbol] [symbol] ITCP
PPMSVEHADIWVKSYSLYSRERYICNSGFKRKAGTCSLTECVLNKATNVAHWTTPSLKCIRDPALVHQRPAPPS

[0374] Expected Cleavage Products from Legumain Cleavage of P1382:

1) Fc-b-PLGLSGRSAN homodimer (product from complete
cleavage) (SEQ ID NO: 276)
Chains 1 and 2
EPKSSDKTHTCPPCPAPEAAGGPSVFLFPPKPKDTLYITREPEVTCVVVDVSHEDPEVKFNWY
VDGVEVHNAKTKPREEQYNSTYRVVSVLTVLHQDWLNGKEYKCKVSNKALAAPIEKTISKAKGQPREPQVYTLPP
SREEMTKNQVSLTCLVKGFYPSDIAVEWESNGQPENNYKTTPPVLDSDGSFFLYSKLTVDKSRWQQGNVFSCSVM
HEALHNHYTQKSLSLSPGK [symbol]
2) AG-IL-15(S162A, L52C)-(GGS)5-IL-15Rα(S40C) homodimer(product
from complete cleavage, active) (SEQ ID NO: 277)
Chains 1 and 2 [symbol]
NWVNVISDLKKIEDLIQSMHIDATLYTESDVHPSCKVTAMKCELLELQVISCESGDASIHD
TVENLIILANNSLSSNGNVTESGCKECEELEEKNIKEFLQSFVHIVQMFINTA [symbol] [symbol] ITCPPPM
SVEHADIWVKSYSLYSRERYICNSGFKRKAGTCSLTECVLNKATNVAHWTTPSLKCIRDPALVHQRPAPPS
3) Fc-b-PLGLSGRSANAG-IL-15(S162A, L52C)-(GGS)5-IL-
15Rα(S40C)/Fc-b-PLGLSGRSAN/AG-IL-15(S162A, L52C)-(GGS)5-IL-15Rα(S40C)
(product from partial cleavage, active)
Chain 1: Fc-b-PLGLSGRSANAG-IL-15(S162A, L52C)-(GGS)5-IL-
15Rα(S40C) (SEQ ID NO: 278)
EPKSSDKTHTCPPCPAPEAAGGPSVFLFPPKPKDTLYITREPEVTCVVVDVSHEDPEVKFNWY
VDGVEVHNAKTKPREEQYNSTYRVVSVLTVLHQDWLNGKEYKCKVSNKALAAPIEKTISKAKGQPREPQVYTLPP
SREEMTKNQVSLTCLVKGFYPSDIAVEWESNGQPENNYKTTPPVLDSDGSFFLYSKLTVDKSRWQQGNVFSCSVM
HEALHNHYTQKSLSLSPGK [symbol] NWVNVISDLKKIEDLIQSMHIDATLYTESDVHPSCKVTAMKCFL
LELQVISCESGDASIHDTVENLIILANNSLSSNGNVTESGCKECEELEEKNIKEFLQSFVHIVQMFINTA [symbol] [symbol]
ITCPPPMSVEHADIWVKSYSLYSRERYICNSGFKRKAGTCSLTECVLNKATNVAHWTTPSLKCIR
DPALVHQRPAPPS
Chain 2: Fc-b-PLGLSGRSAN (SEQ ID NO: 279)
EPKSSDKTHTCPPCPAPEAAGGPSVFLFPPKPKDTLYITREPEVTCVVVDVSHEDPEVKFNWY
VDGVEVHNAKTKPREEQYNSTYRVVSVLTVLHQDWLNGKEYKCKVSNKALAAPIEKTISKAKGQPREPQVYTLPP
SREEMTKNQVSLTCLVKGFYPSDIAVEWESNGQPENNYKTTPPVLDSDGSFFLYSKLTVDKSRWQQGNVFSCSVM
HEALHNHYTQKSLSLSPGK [symbol]
Chain 3: AG-IL-15(S162A, L52C)-(GGS)5-IL-15Rα(S40C) (SEQ ID NO:
280) [symbol]
NWVNVISDLKKIEDLIQSMHIDATLYTESDVHPSCKVTAMKCELLELQVISCESGDASIHD
TVENLIILANNSLSSNGNVTESGCKECEELEEKNIKEFLQSFVHIVQMFINTA [symbol] [symbol] ITCPPPM
SVEHADIWVKSYSLYSRERYICNSGFKRKAGTCSLTECVLNKATNVAHWTTPSLKCIRDPALVHQRPAPPS

[0375] Expected Cleavage Products from MMP-2 or MMP-9 Cleavage of P1382:

1) Fc-b-PLG homodimer (product from complete cleavage) (SEQ ID
NO: 281)
Chains 1 and 2
EPKSSDKTHTCPPCPAPEAAGGPSVFLFPPKPKDTLYITREPEVTCVVVDVSHEDPEVKFNWY
VDGVEVHNAKTKPREEQYNSTYRVVSVLTVLHQDWLNGKEYKCKVSNKALAAPIEKTISKAKGQPREPQVYTLPP
SREEMTKNQVSLTCLVKGFYPSDIAVEWESNGQPENNYKTTPPVLDSDGSFFLYSKLTVDKSRWQQGNVFSCSVM
HEALHNHYTQKSLSLSPGK [symbol]
2) LSGRSANAG-IL-15(S162A, L52C)-(GGS)5-IL-15Ru(S40C)
homodimer(product from complete cleavage, active) (SEQ ID NO: 282)
Chains 1 and 2 [symbol]
NWVNVISDLKKIEDLIQSMHIDATLYTESDVHPSCKVTAMKCELLELQVISCES
GDASIHDTVENLIILANNSLSSNGNVTESGCKECEELEEKNIKEFLQSFVHIVQMFINTA [symbol] [symbol]
ITCPPPMSVEHADIWVKSYSLYSRERYICNSGFKRKAGTCSLTECVLNKATNVAHWTTPSLKCIRDPALVHQRPA
PPS
3) Fc-b-PLGLSGRSANAG-IL-15(S162A, L52C)-(GGS)5-IL-
15Rα(S40C)/Fc-b-PLG/LSGRSANAG-IL-15(S162A, L52C)-(GGS)5-IL-15Rα(S40C)
(product from partial cleavage, active)
Chain 1: Fc-b-PLGLSGRSANAG-IL-15(S162A, L52C)-(GGS)5-IL-
15Rα(S40C) (SEQ ID NO: 283)
EPKSSDKTHTCPPCPAPEAAGGPSVFLFPPKPKDTLYITREPEVTCVVVDVSHEDPEVKFNWY
VDGVEVHNAKTKPREEQYNSTYRVVSVLTVLHQDWLNGKEYKCKVSNKALAAPIEKTISKAKGQPREPQVYTLPP
SREEMTKNQVSLTCLVKGFYPSDIAVEWESNGQPENNYKTTPPVLDSDGSFFLYSKLTVDKSRWQQGNVFSCSVM
HEALHNHYTQKSLSLSPGK [symbol] NWVNVISDLKKIEDLIQSMHIDATLYTESDVHPSCKVTAMKCFL
LELQVISCESGDASIHDTVENLIILANNSLSSNGNVTESGCKECEELEEKNIKEFLQSFVHIVQMFINTA [symbol] [symbol]
ITCPPPMSVEHADIWVKSYSLYSRERYICNSGFKRKAGTCSLTECVLNKATNVAHWTTPSLKCIR
DPALVHQRPAPPS
Chain 2: Fc-b-PLG (SEQ ID NO: 284)
EPKSSDKTHTCPPCPAPEAAGGPSVFLFPPKPKDTLYITREPEVTCVVVDVSHEDPEVKFNWY
VDGVEVHNAKTKPREEQYNSTYRVVSVLTVLHQDWLNGKEYKCKVSNKALAAPIEKTISKAKGQPREPQVYTLPP
SREEMTKNQVSLTCLVKGFYPSDIAVEWESNGQPENNYKTTPPVLDSDGSFFLYSKLTVDKSRWQQGNVFSCSVM
HEALHNHYTQKSLSLSPGK [symbol]
Chain 3: LSGRSANAG-IL-15(S162A, L52C)-(GGS)5-IL-15Rα(S40C) (SEQ
ID NO: 285) [symbol]
NWVNVISDLKKIEDLIQSMHIDATLYTESDVHPSCKVTAMKCELLELQVISCES
GDASIHDTVENLIILANNSLSSNGNVTESGCKECEELEEKNIKEFLQSFVHIVQMFINTA [symbol] [symbol]
ITCPPPMSVEHADIWVKSYSLYSRERYICNSGFKRKAGTCSLTECVLNKATNVAHWTTPSLKCIRDPALVHQRPA
PPS
Fc-b-PLGLSGRSANA-IL-15(S162A, L52C)-(GGS)5-IL-15Rα(S40C) (SEQ ID
NO: 286)
>P1383_Fc-b-PS4-L15R-S162A_(L:L52C)_(R:S40C) (PLGLSGRSANAGPA →
PLGLSGRSANA) chains 1 and 2
EPKSSDKTHTCPPCPAPEAAGGPSVFLFPPKPKDTLYITREPEVTCVVVDVSHEDPEVKFNWY
VDGVEVHNAKTKPREEQYNSTYRVVSVLTVLHQDWLNGKEYKCKVSNKALAAPIEKTISKAKGQPREPQVYTLPP
SREEMTKNQVSLTCLVKGFYPSDIAVEWESNGQPENNYKTTPPVLDSDGSFFLYSKLTVDKSRWQQGNVFSCSVM
HEALHNHYTQKSLSLSPGK [symbol] NWVNVISDLKKIEDLIQSMHIDATLYTESDVHPSCKVTAMKCFLL
ELQVISCESGDASIHDTVENLIILANNSLSSNGNVTESGCKECEELEEKNIKEFLQSFVHIVQMFINTA [symbol] [symbol]
ITCPPPMSVEHADIWVKSYSLYSRERYICNSGFKRKAGTCSLTECVLNKATNVAHWTTPSLKCIRD
PALVHQRPAPPS

[0376] Expected Cleavage Products from uPA or Matriptase Cleavage of P1383:

1) Fc-b-PLGLSGR homodimer (product from complete cleavage) (SEQ
ID NO: 287)
Chains 1 and 2
EPKSSDKTHTCPPCPAPEAAGGPSVFLFPPKPKDTLYITREPEVTCVVVDVSHEDPEVKFNWY
VDGVEVHNAKTKPREEQYNSTYRVVSVLTVLHQDWLNGKEYKCKVSNKALAAPIEKTISKAKGQPREPQVYTLPP
SREEMTKNQVSLTCLVKGFYPSDIAVEWESNGQPENNYKTTPPVLDSDGSFFLYSKLTVDKSRWQQGNVFSCSVM
HEALHNHYTQKSLSLSPGK [symbol]
2) SANA-IL-15(S162A, L52C)-(GGS)5-IL-15Rα(S40C)
homodimer (product from complete cleavage, active) (SEQ ID NO: 288)
Chains 1 and 2 [symbol]
NWVNVISDLKKIEDLIQSMHIDATLYTESDVHPSCKVTAMKCELLELQVISCESGDASI
HDTVENLIILANNSLSSNGNVTESGCKECEELEEKNIKEFLQSFVHIVQMFINTA [symbol] [symbol] ITCPP
PMSVEHADIWVKSYSLYSRERYICNSGFKRKAGTCSLTECVLNKATNVAHWTTPSLKCIRDPALVHQRPAPPS
3) Fc-b-PLGLSGRSANA-IL-15(S162A, L52C)-(GGS)5-IL-15Rα(S40C)/Fc-
b-PLGLSGR/SANA-IL-15(S162A, L52C)-(GGS)5-IL-15Rα(S40C) (product from partial
cleavage, active)
Chain 1: Fc-b-PLGLSGRSANA-IL-15(S162A, L52C)-(GGS)5-IL-
15Rα(S40C) (SEQ ID NO: 289)
EPKSSDKTHTCPPCPAPEAAGGPSVFLFPPKPKDTLYITREPEVTCVVVDVSHEDPEVKFNWY
VDGVEVHNAKTKPREEQYNSTYRVVSVLTVLHQDWLNGKEYKCKVSNKALAAPIEKTISKAKGQPREPQVYTLPP
SREEMTKNQVSLTCLVKGFYPSDIAVEWESNGQPENNYKTTPPVLDSDGSFFLYSKLTVDKSRWQQGNVFSCSVM
HEALHNHYTQKSLSLSPGK [symbol] NWVNVISDLKKIEDLIQSMHIDATLYTESDVHPSCKVTAMKCELL
ELQVISCESGDASIHDTVENLIILANNSLSSNGNVTESGCKECEELEEKNIKEFLQSFVHIVQMFINTA [symbol] [symbol]
ITCPPPMSVEHADIWVKSYSLYSRERYICNSGFKRKAGTCSLTECVLNKATNVAHWTTPSLKCIRD
PALVHQRPAPPS
Chain 2: Fc-b-PLGLSGR (SEQ ID NO: 290)
EPKSSDKTHTCPPCPAPEAAGGPSVFLFPPKPKDTLYITREPEVTCVVVDVSHEDPEVKFNWY
VDGVEVHNAKTKPREEQYNSTYRVVSVLTVLHQDWLNGKEYKCKVSNKALAAPIEKTISKAKGQPREPQVYTLPP
SREEMTKNQVSLTCLVKGFYPSDIAVEWESNGQPENNYKTTPPVLDSDGSFFLYSKLTVDKSRWQQGNVFSCSVM
HEALHNHYTQKSLSLSPGK [symbol]
Chain 3: SANA-IL-15(S162A, L52C)-(GGS)5-IL-15Rα(S40C) (SEQ ID
NO: 291) [symbol]
NWVNVISDLKKIEDLIQSMHIDATLYTESDVHPSCKVTAMKCELLELQVISCESGDASI
HDTVENLIILANNSLSSNGNVTESGCKECEELEEKNIKEFLQSFVHIVQMFINTA [symbol] [symbol] ITCPP
PMSVEHADIWVKSYSLYSRERYICNSGFKRKAGTCSLTECVLNKATNVAHWTTPSLKCIRDPALVHQRPAPPS

[0377] Expected Cleavage Products from Legumain Cleavage of P1383:

1) Fc-b-PLGLSGRSAN homodimer (product from complete
cleavage) (SEQ ID NO: 292)
Chains 1 and 2
EPKSSDKTHTCPPCPAPEAAGGPSVFLFPPKPKDTLYITREPEVTCVVVDVSHEDPEVKFNWY
VDGVEVHNAKTKPREEQYNSTYRVVSVLTVLHQDWLNGKEYKCKVSNKALAAPIEKTISKAKGQPREPQVYTLPP
SREEMTKNQVSLTCLVKGFYPSDIAVEWESNGQPENNYKTTPPVLDSDGSFFLYSKLTVDKSRWQQGNVFSCSVM
HEALHNHYTQKSLSLSPGK [symbol]
2) A-IL-15(S162A, L52C)-(GGS)5-IL-15Rα(S40C) homodimer(product
from complete cleavage, active) (SEQ ID NO: 293)
Chains 1 and 2
ANWVNVISDLKKIEDLIQSMHIDATLYTESDVHPSCKVTAMKCFLLELQVISCESGDASIHDT
VENLIILANNSLSSNGNVTESGCKECEELEEKNIKEFLQSFVHIVQMFINTA [symbol] [symbol] ITCPPPMS
VEHADIWVKSYSLYSRERYICNSGFKRKAGTCSLTECVLNKATNVAHWTTPSLKCIRDPALVHQRPAPPS
3) Fc-b-PLGLSGRSANA-IL-15(S162A, L52C)-(GGS)5-IL-15Rα(S40C)/Fc-
b-PLGLSGRSAN/A-IL-15(S162A, L52C)-(GGS)5-IL-15Rα(S40C) (product from partial
cleavage, active)
Chain 1: Fc-b-PLGLSGRSANA-IL-15(S162A, L52C)-(GGS)5-IL-
15Rα(S40C) (SEQ ID NO: 294)
EPKSSDKTHTCPPCPAPEAAGGPSVFLFPPKPKDTLYITREPEVTCVVVDVSHEDPEVKFNWY
VDGVEVHNAKTKPREEQYNSTYRVVSVLTVLHQDWLNGKEYKCKVSNKALAAPIEKTISKAKGQPREPQVYTLPP
SREEMTKNQVSLTCLVKGFYPSDIAVEWESNGQPENNYKTTPPVLDSDGSFFLYSKLTVDKSRWQQGNVFSCSVM
HEALHNHYTQKSLSLSPGK [symbol] NWVNVISDLKKIEDLIQSMHIDATLYTESDVHPSCKVTAMKCELL
ELQVISCESGDASIHDTVENLIILANNSLSSNGNVTESGCKECEELEEKNIKEFLQSFVHIVQMFINTA [symbol] [symbol]
ITCPPPMSVEHADIWVKSYSLYSRERYICNSGFKRKAGTCSLTECVLNKATNVAHWTTPSLKCIRD
PALVHQRPAPPS
Chain 2: Fc-b-PLGLSGRSAN (SEQ ID NO: 295)
EPKSSDKTHTCPPCPAPEAAGGPSVFLFPPKPKDTLYITREPEVTCVVVDVSHEDPEVKFNWY
VDGVEVHNAKTKPREEQYNSTYRVVSVLTVLHQDWLNGKEYKCKVSNKALAAPIEKTISKAKGQPREPQVYTLPP
SREEMTKNQVSLTCLVKGFYPSDIAVEWESNGQPENNYKTTPPVLDSDGSFFLYSKLTVDKSRWQQGNVFSCSVM
HEALHNHYTQKSLSLSPGK [symbol]
Chain 3: A-IL-15(S162A, L52C)-(GGS)5-IL-15Rα(S40C) (SEQ ID NO:
296)
ANWVNVISDLKKIEDLIQSMHIDATLYTESDVHPSCKVTAMKCFLLELQVISCESGDASIHDT
VENLIILANNSLSSNGNVTESGCKECEELEEKNIKEFLQSFVHIVQMFINTA [symbol] [symbol] ITCPPPMS
VEHADIWVKSYSLYSRERYICNSGFKRKAGTCSLTECVLNKATNVAHWTTPSLKCIRDPALVHQRPAPPS

[0378] Expected Cleavage Products from MMP-2 or MMP-9 Cleavage of P1383:

1) Fc-b-PLG homodimer (product from complete cleavage)(SEQ ID
NO: 297)
Chains 1 and 2
EPKSSDKTHTCPPCPAPEAAGGPSVFLFPPKPKDTLYITREPEVTCVVVDVSHEDPEVKFNWY
VDGVEVHNAKTKPREEQYNSTYRVVSVLTVLHQDWLNGKEYKCKVSNKALAAPIEKTISKAKGQPREPQVYTLPP
SREEMTKNQVSLTCLVKGFYPSDIAVEWESNGQPENNYKTTPPVLDSDGSFFLYSKLTVDKSRWQQGNVFSCSVM
HEALHNHYTQKSLSLSPGK [symbol]
2) LSGRSANA-IL-15(S162A, L52C)-(GGS)5-IL-15Rα(540C)
homodimer(product from complete cleavage, active) (SEQ ID NO: 298)
Chains 1 and 2 [symbol]
NWVNVISDLKKIEDLIQSMHIDATLYTESDVHPSCKVTAMKCELLELQVISCESG
DASIHDTVENLIILANNSLSSNGNVTESGCKECEELEEKNIKEFLQSFVHIVQMFINTA [symbol] [symbol] I
TCPPPMSVEHADIWVKSYSLYSRERYICNSGFKRKAGTCSLTECVLNKATNVAHWTTPSLKCIRDPALVHQRPAP
PS
3) Fc-b-PLGLSGRSANA-IL-15(S162A, L52C)-(GGS)5-IL-15Rα(S40C)/Fc-
b-PLG/LSGRSANA-IL-15(S162A, L52C)-(GGS)5-IL-15Rα(S40C) (product from partial
cleavage, active)
Chain 1: Fc-b-PLGLSGRSANA-IL-15(S162A, L52C)-(GGS)5-IL-
15Rα(S40C) (SEQ ID NO: 299)
EPKSSDKTHTCPPCPAPEAAGGPSVFLFPPKPKDTLYITREPEVTCVVVDVSHEDPEVKFNWY
VDGVEVHNAKTKPREEQYNSTYRVVSVLTVLHQDWLNGKEYKCKVSNKALAAPIEKTISKAKGQPREPQVYTLPP
SREEMTKNQVSLTCLVKGFYPSDIAVEWESNGQPENNYKTTPPVLDSDGSFFLYSKLTVDKSRWQQGNVFSCSVM
HEALHNHYTQKSLSLSPGK [symbol] NWVNVISDLKKIEDLIQSMHIDATLYTESDVHPSCKVTAMKCELL
ELQVISCESGDASIHDTVENLIILANNSLSSNGNVTESGCKECEELEEKNIKEFLQSFVHIVQMFINTA [symbol] [symbol]
ITCPPPMSVEHADIWVKSYSLYSRERYICNSGFKRKAGTCSLTECVLNKATNVAHWTTPSLKCIRD
PALVHQRPAPPS
Chain 2: Fc-b-PLG (SEQ ID NO: 300)
EPKSSDKTHTCPPCPAPEAAGGPSVFLFPPKPKDTLYITREPEVTCVVVDVSHEDPEVKFNWY
VDGVEVHNAKTKPREEQYNSTYRVVSVLTVLHQDWLNGKEYKCKVSNKALAAPIEKTISKAKGQPREPQVYTLPP
SREEMTKNQVSLTCLVKGFYPSDIAVEWESNGQPENNYKTTPPVLDSDGSFFLYSKLTVDKSRWQQGNVFSCSVM
HEALHNHYTQKSLSLSPGK [symbol]
Chain 3: LSGRSANA-IL-15(S162A, L52C)-(GGS)5-IL-15Rα(S40C) (SEQ
ID NO: 301) [symbol]
NWVNVISDLKKIEDLIQSMHIDATLYTESDVHPSCKVTAMKCELLELQVISCESG
DASIHDTVENLIILANNSLSSNGNVTESGCKECEELEEKNIKEFLQSFVHIVQMFINTA [symbol] [symbol] I
TCPPPMSVEHADIWVKSYSLYSRERYICNSGFKRKAGTCSLTECVLNKATNVAHWTTPSLKCIRDPALVHQRPAP
PS
Fc-G-IL-15(S162A)-GGSGGSEPKENLYFQGGGSGGSGGGS-IL-15Rα (SEQ ID NO: 302)
>P1393_Fc-1-L26-PS-R (IL15_S162A) chains 1 and 2
EPKSSDKTHTCPPCPAPELLGGPSVFLFPPKPKDTLMISRTPEVTCVVVDVSHEDPEVKFNWY
VDGVEVHNAKTKPREEQYNSTYRVVSVLTVLHQDWLNGKEYKCKVSNKALPAPIEKTISKAKGQPREPQVYTLPP
SREEMTKNQVSLTCLVKGFYPSDIAVEWESNGQPENNYKTTPPVLDSDGSFFLYSKLTVDKSRWQQGNVFSCSVM
HEALHNHYTQKSLSLSPGK [symbol] NWVNVISDLKKIEDLIQSMHIDATLYTESDVHPSCKVTAMKCELLELQVISLESG
DASIHDTVENLIILANNSLSSNGNVTESGCKECEELEEKNIKEFLQSFVHIVQMFINTA [symbol] [symbol] [symbol]
ITCPPPMSVEHADIWVKSYSLYSRERYICNSGFKRKAGTSSLTECVLNKATNVAHWTTPSLKCIR
DPALVHQRPAPPS

[0379] Expected Cleavage Products from TEV Cleavage of P1393:

1) Fc-G-IL-15(S162A)-GGSGGSEPKENLYFQ homodimer (product from
complete cleavage) (SEQ ID NO: 303)
Chains 1 and 2
EPKSSDKTHTCPPCPAPELLGGPSVFLFPPKPKDTLMISRTPEVTCVVVDVSHEDPEVKFNWY
VDGVEVHNAKTKPREEQYNSTYRVVSVLTVLHQDWLNGKEYKCKVSNKALPAPIEKTISKAKGQPREPQVYTLPP
SREEMTKNQVSLTCLVKGFYPSDIAVEWESNGQPENNYKTTPPVLDSDGSFFLYSKLTVDKSRWQQGNVFSCSVM
HEALHNHYTQKSLSLSPGK [symbol] NWVNVISDLKKIEDLIQSMHIDATLYTESDVHPSCKVTAMKCELLELQVISLESG
DASIHDTVENLIILANNSLSSNGNVTESGCKECEELEEKNIKEFLQSFVHIVQMFINTA [symbol] [symbol]
2) GGGSGGSGGGS-IL-15Rα homodimer(product from complete
cleavage, active) (SEQ ID NO: 304)
Chains 1 and 2 [symbol]
ITCPPPMSVEHADIWVKSYSLYSRERYICNSGFKRKAGTSSLTECVLNKATN
VAHWTTPSLKCIRDPALVHQRPAPPS
3) Fc-G-IL-15(S162A)-GGSGGSEPKENLYFQGGGSGGSGGGS-IL-15Rα/Fc-G-
IL-15(S162A)-GGSGGSEPKENLYFQ/GGGSGGSGGGS-IL-15Rα (product from partial
cleavage, active)
Chain 1: Fc-G-IL-15(S162A)-GGSGGSEPKENLYFQGGGSGGSGGGS-IL-
15Rα (SEQ ID NO: 305)
EPKSSDKTHTCPPCPAPELLGGPSVFLFPPKPKDTLMISRTPEVTCVVVDVSHEDPEVKFNWY
VDGVEVHNAKTKPREEQYNSTYRVVSVLTVLHQDWLNGKEYKCKVSNKALPAPIEKTISKAKGQPREPQVYTLPP
SREEMTKNQVSLTCLVKGFYPSDIAVEWESNGQPENNYKTTPPVLDSDGSFFLYSKLTVDKSRWQQGNVFSCSVM
HEALHNHYTQKSLSLSPGK [symbol] NWVNVISDLKKIEDLIQSMHIDATLYTESDVHPSCKVTAMKCELLELQVISLESG
DASIHDTVENLIILANNSLSSNGNVTESGCKECEELEEKNIKEFLQSFVHIVQMFINTA [symbol] [symbol] [symbol]
ITCPPPMSVEHADIWVKSYSLYSRERYICNSGFKRKAGTSSLTECVLNKATNVAHWTTPSLKCIR
DPALVHQRPAPPS
Chain 2: Fc-G-IL-15(S162A)-GGSGGSEPKENLYFQ (SEQ ID NO: 306)
EPKSSDKTHTCPPCPAPELLGGPSVFLFPPKPKDTLMISRTPEVTCVVVDVSHEDPEVKFNWY
VDGVEVHNAKTKPREEQYNSTYRVVSVLTVLHQDWLNGKEYKCKVSNKALPAPIEKTISKAKGQPREPQVYTLPP
SREEMTKNQVSLTCLVKGFYPSDIAVEWESNGQPENNYKTTPPVLDSDGSFFLYSKLTVDKSRWQQGNVFSCSVM
HEALHNHYTQKSLSLSPGK [symbol] NWVNVISDLKKIEDLIQSMHIDATLYTESDVHPSCKVTAMKCELLELQVISLESG
DASIHDTVENLIILANNSLSSNGNVTESGCKECEELEEKNIKEFLQSFVHIVQMFINTA [symbol] [symbol]
Chain 3: GGGSGGSGGGS-IL-15Rα (SEQ ID NO: 307) [symbol]
ITCPPPMSVEHADIWVKSYSLYSRERYICNSGFKRKAGTSSLTECVLNKATN
VAHWTTPSLKCIRDPALVHQRPAPPS
Fc-GGSGGS-IL-15(S162A)-GGSGGSEPKENLYFQGGGSGGSGGGS-IL-15Rα (SEQ
ID NO: 308)
>P1394_Fc-6-L26-PS-R (IL15_S162A) chains 1 and 2
EPKSSDKTHTCPPCPAPELLGGPSVFLFPPKPKDTLMISRTPEVTCVVVDVSHEDPEVKFNWYVDGVEVHNAKTK
PREEQYNSTYRVVSVLTVLHQDWLNGKEYKCKVSNKALPAPIEKTISKAKGQPREPQVYTLPPSREEMTKNQVSL
TCLVKGFYPSDIAVEWESNGQPENNYKTTPPVLDSDGSFFLYSKLTVDKSRWQQGNVFSCSVMHEALHNHYTQKS
LSLSPGK [symbol] NWVNVISDLKKIEDLIQSMHIDATLYTESDVHPSCKVTAMKCFLLELQVISLESGDASIHDT
VENLIILANNSLSSNGNVTESGCKECEELEEKNIKEFLQSFVHIVQMFINTA [symbol] [symbol] [symbol]
ITCPPPMSVEHADIWVKSYSLYSRERYICNSGFKRKAGTSSLTECVLNKATNVAHWTTPSLKCIRDPALVHQ
RPAPPS

[0380] Expected Cleavage Products from TEV Cleavage of P1394:

1) Fc-GGSGGS-IL-15(S162A)-GGSGGSEPKENLYFQ homodimer (product
from complete cleavage) (SEQ ID NO: 309)
Chains 1 and 2
EPKSSDKTHTCPPCPAPELLGGPSVFLFPPKPKDTLMISRTPEVTCVVVDVSHEDPEVKFNWY
VDGVEVHNAKTKPREEQYNSTYRVVSVLTVLHQDWLNGKEYKCKVSNKALPAPIEKTISKAKGQPREPQVYTLPP
SREEMTKNQVSLTCLVKGFYPSDIAVEWESNGQPENNYKTTPPVLDSDGSFFLYSKLTVDKSRWQQGNVFSCSVM
HEALHNHYTQKSLSLSPGK [symbol] NWVNVISDLKKIEDLIQSMHIDATLYTESDVHPSCKVTAMKCFLLELQVI
SLESGDASIHDTVENLIILANNSLSSNGNVTESGCKECEELEEKNIKEFLQSFVHIVQMFINTA

[symbol]

[symbol]

2) GGGSGGSGGGS-IL-15Rα homodimer (product from complete
cleavage, active) (SEQ ID NO: 310)
Chains 1 and 2 [symbol]
ITCPPPMSVEHADIWVKSYSLYSRERYICNSGFKRKAGTSSLTECVLNKATN
VAHWTTPSLKCIRDPALVHQRPAPPS
3) Fc-GGSGGS-IL-15(S162A)-GGSGGSEPKENLYFQGGGSGGSGGGS-IL-
15Rα/Fc-GGSGGS-IL-15(S162A)-GGSGGSEPKENLYFQ/GGGSGGSGGGS-IL-15Rα (product
from partial cleavage, active)
Chain 1: Fc-GGSGGS-IL-15(S162A)-GGSGGSEPKENLYFQGGGSGGSGGGS-IL-
15Rα (SEQ ID NO: 311)
EPKSSDKTHTCPPCPAPELLGGPSVFLFPPKPKDTLMISRTPEVTCVVVDVSHEDPEVKFNWY
VDGVEVHNAKTKPREEQYNSTYRVVSVLTVLHQDWLNGKEYKCKVSNKALPAPIEKTISKAKGQPREPQVYTLPP
SREEMTKNQVSLTCLVKGFYPSDIAVEWESNGQPENNYKTTPPVLDSDGSFFLYSKLTVDKSRWQQGNVFSCSVM
HEALHNHYTQKSLSLSPGK [symbol] NWVNVISDLKKIEDLIQSMHIDATLYTESDVHPSCKVTAMKCELLELQVI
SLESGDASIHDTVENLIILANNSLSSNGNVTESGCKECEELEEKNIKEFLQSFVHIVQMFINTA [symbol] [symbol]
ITCPPPMSVEHADIWVKSYSLYSRERYICNSGFKRKAGTSSLTECVLNKATNVAHWTTPS
LKCIRDPALVHQRPAPPS
Chain 2: Fc-GGSGGS-IL-15(S162A)-GGSGGSEPKENLYFQ (SEQ ID NO: 312)
EPKSSDKTHTCPPCPAPELLGGPSVFLFPPKPKDTLMISRTPEVTCVVVDVSHEDPEVKFNWY
VDGVEVHNAKTKPREEQYNSTYRVVSVLTVLHQDWLNGKEYKCKVSNKALPAPIEKTISKAKGQPREPQVYTLPP
SREEMTKNQVSLTCLVKGFYPSDIAVEWESNGQPENNYKTTPPVLDSDGSFFLYSKLTVDKSRWQQGNVFSCSVM
HEALHNHYTQKSLSLSPGK [symbol] NWVNVISDLKKIEDLIQSMHIDATLYTESDVHPSCKVTAMKCELLELQVI
SLESGDASIHDTVENLIILANNSLSSNGNVTESGCKECEELEEKNIKEFLQSFVHIVQMFINTA

[symbol]

[symbol]

Chain 3: GGGSGGSGGGS-IL-15Rα (SEQ ID NO: 313) [symbol]
ITCPPPMSVEHADIWVKSYSLYSRERYICNSGFKRKAGTSSLTECVLNKATN
VAHWTTPSLKCIRDPALVHQRPAPPS
Fc-GGSGGSGGSGGS-IL-15(S162A)-GGSGGSEPKENLYFQGGGSGGSGGGS-IL-
15Rα (SEQ ID NO: 314)
>P1395_Fc-12-L26-PS-R (IL15_S162A) chains 1 and 2
EPKSSDKTHTCPPCPAPELLGGPSVFLFPPKPKDTLMISRTPEVTCVVVDVSHEDPEVKFNWYVDGVEVHNAKTK
PREEQYNSTYRVVSVLTVLHQDWLNGKEYKCKVSNKALPAPIEKTISKAKGQPREPQVYTLPPSREEMTKNQVSL
TCLVKGFYPSDIAVEWESNGQPENNYKTTPPVLDSDGSFFLYSKLTVDKSRWQQGNVFSCSVMHEALHNHYTQKS
LSLSPGK [symbol] NWVNVISDLKKIEDLIQSMHIDATLYTESDVHPSCKVTAMKCFLLELQVISLESGD
ASIHDTVENLIILANNSLSSNGNVTESGCKECEELEEKNIKEFLQSFVHIVQMFINTA [symbol] [symbol] [symbol]
ITCPPPMSVEHADIWVKSYSLYSRERYICNSGFKRKAGTSSLTECVLNKATNVAHWTTPSLKCIRD
PALVHQRPAPPS

[0381] Expected Cleavage Products from TEV Cleavage of P1395:

1) Fc-GGSGGSGGSGGS-IL-15(S162A)-GGSGGSEPKENLYFQ homodimer
(product from complete cleavage) (SEQ ID NO: 315)
Chains 1 and 2
EPKSSDKTHTCPPCPAPELLGGPSVFLFPPKPKDTLMISRTPEVTCVVVDVSHEDPEVKFNWY
VDGVEVHNAKTKPREEQYNSTYRVVSVLTVLHQDWLNGKEYKCKVSNKALPAPIEKTISKAKGQPREPQVYTLPP
SREEMTKNQVSLTCLVKGFYPSDIAVEWESNGQPENNYKTTPPVLDSDGSFFLYSKLTVDKSRWQQGNVFSCSVM
HEALHNHYTQKSLSLSPGK [symbol] NWVNVISDLKKIEDLIQSMHIDATLYTESDVHPSCKVTAMKCFL
LELQVISLESGDASIHDTVENLIILANNSLSSNGNVTESGCKECEELEEKNIKEFLQSFVHIVQMFINTA

[symbol]

[symbol]

2) GGGSGGSGGGS-IL-15Rα homodimer(product from complete
cleavage, active) (SEQ ID NO: 316)
Chains 1 and 2 [symbol]
ITCPPPMSVEHADIWVKSYSLYSRERYICNSGFKRKAGTSSLTECVLNKATN
VAHWTTPSLKCIRDPALVHQRPAPPS
3) Fc-GGSGGSGGSGGS-IL-15(S162A)-GGSGGSEPKENLYFQGGGSGGSGGGS-IL-
15Rα/Fc-GGSGGSGGSGGS-IL-15(S162A)-GGSGGSEPKENLYFQ/GGGSGGSGGGS-IL-15Rα
(product from partial cleavage, active)
Chain 1: Fc-GGSGGSGGSGGS-IL-15(S162A)-
GGSGGSEPKENLYFQGGGSGGSGGGS-IL-15Rα (SEQ ID NO: 317)
EPKSSDKTHTCPPCPAPELLGGPSVFLFPPKPKDTLMISRTPEVTCVVVDVSHEDPEVKFNWY
VDGVEVHNAKTKPREEQYNSTYRVVSVLTVLHQDWLNGKEYKCKVSNKALPAPIEKTISKAKGQPREPQVYTLPP
SREEMTKNQVSLTCLVKGFYPSDIAVEWESNGQPENNYKTTPPVLDSDGSFFLYSKLTVDKSRWQQGNVFSCSVM
HEALHNHYTQKSLSLSPGK [symbol] NWVNVISDLKKIEDLIQSMHIDATLYTESDVHPSCKVTAMKCFL
LELQVISLESGDASIHDTVENLIILANNSLSSNGNVTESGCKECEELEEKNIKEFLQSFVHIVQMFINTA [symbol] [symbol] [symbol]
ITCPPPMSVEHADIWVKSYSLYSRERYICNSGFKRKAGTSSLTECVLNKATNVA
HWTTPSLKCIRDPALVHQRPAPPS
Chain 2: Fc-GGSGGSGGSGGS-IL-15(S162A)-GGSGGSEPKENLYFQ (SEQ ID
NO: 318)
EPKSSDKTHTCPPCPAPELLGGPSVFLFPPKPKDTLMISRTPEVTCVVVDVSHEDPEVKFNWY
VDGVEVHNAKTKPREEQYNSTYRVVSVLTVLHQDWLNGKEYKCKVSNKALPAPIEKTISKAKGQPREPQVYTLPP
SREEMTKNQVSLTCLVKGFYPSDIAVEWESNGQPENNYKTTPPVLDSDGSFFLYSKLTVDKSRWQQGNVFSCSVM
HEALHNHYTQKSLSLSPGK [symbol] NWVNVISDLKKIEDLIQSMHIDATLYTESDVHPSCKVTAMKCFL
LELQVISLESGDASIHDTVENLIILANNSLSSNGNVTESGCKECEELEEKNIKEFLQSFVHIVQMFINTA

[symbol]

[symbol]

Chain 3: GGGSGGSGGGS-IL-15Rα (SEQ ID NO: 319) [symbol]
ITCPPPMSVEHADIWVKSYSLYSRERYICNSGFKRKAGTSSLTECVLNKATN
VAHWTTPSLKCIRDPALVHQRPAPPS
Fc-G-IL-15(S162A, L52C)-GGSGGSEPKENLYFQGGGSGGSGGGS-IL-
15Rα(S40C) (SEQ ID NO: 320)
>P1396_Fc-1-L26-PS-R (IL15:S162A, L52C_IL15R:S40C) chains 1 and 2
EPKSSDKTHTCPPCPAPELLGGPSVFLFPPKPKDTLMISRTPEVTCVVVDVSHEDPEVKFNWY
VDGVEVHNAKTKPREEQYNSTYRVVSVLTVLHQDWLNGKEYKCKVSNKALPAPIEKTISKAKGQPREPQVYTLPP
SREEMTKNQVSLTCLVKGFYPSDIAVEWESNGQPENNYKTTPPVLDSDGSFFLYSKLTVDKSRWQQGNVFSCSVM
HEALHNHYTQKSLSLSPGK [symbol] NWVNVISDLKKIEDLIQSMHIDATLYTESDVHPSCKVTAMKCELLELQVISCESG
DASIHDTVENLIILANNSLSSNGNVTESGCKECEELEEKNIKEFLQSFVHIVQMFINTA [symbol] [symbol] [symbol]
ITCPPPMSVEHADIWVKSYSLYSRERYICNSGFKRKAGTCSLTECVLNKATNVAHWTTPSLKCIR
DPALVHQRPAPPS

[0382] Expected Cleavage Products from TEV Cleavage of P1396:

1) Fc-G-IL-15(S162A, L52C)-GGSGGSEPKENLYFQ homodimer (product
from complete cleavage) (SEQ ID NO: 321)
Chains 1 and 2
EPKSSDKTHTCPPCPAPELLGGPSVFLFPPKPKDTLMISRTPEVTCVVVDVSHEDPEVKFNWY
VDGVEVHNAKTKPREEQYNSTYRVVSVLTVLHQDWLNGKEYKCKVSNKALPAPIEKTISKAKGQPREPQVYTLPP
SREEMTKNQVSLTCLVKGFYPSDIAVEWESNGQPENNYKTTPPVLDSDGSFFLYSKLTVDKSRWQQGNVFSCSVM
HEALHNHYTQKSLSLSPGK [symbol] NWVNVISDLKKIEDLIQSMHIDATLYTESDVHPSCKVTAMKCELLELQVISCESG
DASIHDTVENLIILANNSLSSNGNVTESGCKECEELEEKNIKEFLQSFVHIVQMFINTA [symbol] [symbol]
2) GGGSGGSGGGS-IL-15Rα(S40C) homodimer(product from complete
cleavage, active) (SEQ ID NO: 322)
Chains 1 and 2 [symbol]
ITCPPPMSVEHADIWVKSYSLYSRERYICNSGFKRKAGTCSLTECVLNKATN
VAHWTTPSLKCIRDPALVHQRPAPPS
3) Fc-G-IL-15(S162A, L52C)-GGSGGSEPKENLYFQGGGSGGSGGGS-IL-
15Rα(S40C)/Fc-G-IL-15(S162A, L52C)-GGSGGSEPKENLYFQ/GGGSGGSGGGS-IL-
15Rα(540C) (product from partial cleavage, active)
Chain 1: Fc-G-IL-15(S162A, L52C)-GGSGGSEPKENLYFQGGGSGGSGGGS-IL-
15Rα(540C) (SEQ ID NO: 323)
EPKSSDKTHTCPPCPAPELLGGPSVFLFPPKPKDTLMISRTPEVTCVVVDVSHEDPEVKFNWY
VDGVEVHNAKTKPREEQYNSTYRVVSVLTVLHQDWLNGKEYKCKVSNKALPAPIEKTISKAKGQPREPQVYTLPP
SREEMTKNQVSLTCLVKGFYPSDIAVEWESNGQPENNYKTTPPVLDSDGSFFLYSKLTVDKSRWQQGNVFSCSVM
HEALHNHYTQKSLSLSPGK [symbol] NWVNVISDLKKIEDLIQSMHIDATLYTESDVHPSCKVTAMKCELLELQVISCESG
DASIHDTVENLIILANNSLSSNGNVTESGCKECEELEEKNIKEFLQSFVHIVQMFINTA [symbol] [symbol] [symbol]
ITCPPPMSVEHADIWVKSYSLYSRERYICNSGFKRKAGTCSLTECVLNKATNVAHWTTPSLKCIR
DPALVHQRPAPPS
Chain 2: Fc-G-IL-15(S162A, L52C)-GGSGGSEPKENLYFQ (SEQ ID NO:
324)
EPKSSDKTHTCPPCPAPELLGGPSVFLFPPKPKDTLMISRTPEVTCVVVDVSHEDPEVKFNWY
VDGVEVHNAKTKPREEQYNSTYRVVSVLTVLHQDWLNGKEYKCKVSNKALPAPIEKTISKAKGQPREPQVYTLPP
SREEMTKNQVSLTCLVKGFYPSDIAVEWESNGQPENNYKTTPPVLDSDGSFFLYSKLTVDKSRWQQGNVFSCSVM
HEALHNHYTQKSLSLSPGK [symbol] NWVNVISDLKKIEDLIQSMHIDATLYTESDVHPSCKVTAMKCELLELQVISCESG
DASIHDTVENLIILANNSLSSNGNVTESGCKECEELEEKNIKEFLQSFVHIVQMFINTA [symbol] [symbol]
Chain 3: GGGSGGSGGGS-IL-15Rα(S40C) (SEQ ID NO: 325) [symbol]
ITCPPPMSVEHADIWVKSYSLYSRERYICNSGFKRKAGTCSLTECVLNKATN
VAHWTTPSLKCIRDPALVHQRPAPPS
Fc-GGSGGS-IL-15(S162A, L52C)-GGSGGSEPKENLYFQGGGSGGSGGGS-IL-
15Rα(S40C) (SEQ ID NO: 326)
>P1397_Fc-6-L26-PS-R (IL15:S162A, L52C_IL15R:S40C) chains 1 and 2
EPKSSDKTHTCPPCPAPELLGGPSVFLFPPKPKDTLMISRTPEVTCVVVDVSHEDPEVKFNWY
VDGVEVHNAKTKPREEQYNSTYRVVSVLTVLHQDWLNGKEYKCKVSNKALPAPIEKTISKAKGQPREPQVYTLPP
SREEMTKNQVSLTCLVKGFYPSDIAVEWESNGQPENNYKTTPPVLDSDGSFFLYSKLTVDKSRWQQGNVFSCSVM
HEALHNHYTQKSLSLSPGK [symbol] NWVNVISDLKKIEDLIQSMHIDATLYTESDVHPSCKVTAMKCELLELQVI
SCESGDASIHDTVENLIILANNSLSSNGNVTESGCKECEELEEKNIKEFLQSFVHIVQMFINTA [symbol] [symbol] [symbol]
ITCPPPMSVEHADIWVKSYSLYSRERYICNSGFKRKAGTCSLTECVLNKATNVAHWTTPS
LKCIRDPALVHQRPAPPS

[0383] Expected Cleavage Products from TEV Cleavage of P1397:

1) Fc-GGSGGS-IL-15(S162A, L52C)-GGSGGSEPKENLYFQ homodimer
(product from complete cleavage) (SEQ ID NO: 327)
Chains 1 and 2
EPKSSDKTHTCPPCPAPELLGGPSVFLFPPKPKDTLMISRTPEVTCVVVDVSHEDPEVKFNWY
VDGVEVHNAKTKPREEQYNSTYRVVSVLTVLHQDWLNGKEYKCKVSNKALPAPIEKTISKAKGQPREPQVYTLPP
SREEMTKNQVSLTCLVKGFYPSDIAVEWESNGQPENNYKTTPPVLDSDGSFFLYSKLTVDKSRWQQGNVFSCSVM
HEALHNHYTQKSLSLSPGK [symbol] NWVNVISDLKKIEDLIQSMHIDATLYTESDVHPSCKVTAMKCFLLELQVI
SCESGDASIHDTVENLIILANNSLSSNGNVTESGCKECEELEEKNIKEFLQSFVHIVQMFINTA

[symbol]

[symbol]

2) GGGSGGSGGGS-IL-15Rα(540C) homodimer(product from complete
cleavage, active) (SEQ ID NO: 328)
Chains 1 and 2 [symbol]
ITCPPPMSVEHADIWVKSYSLYSRERYICNSGFKRKAGTCSLTECVLNKATN
VAHWTTPSLKCIRDPALVHQRPAPPS
3) Fc-GGSGGS-IL-15(S162A, L52C)-GGSGGSEPKENLYFQGGGSGGSGGGS-IL-
15Rα(S40C)/Fc-GGSGGS-IL-15(S162A, L52C)-GGSGGSEPKENLYFQ/GGGSGGSGGGS-IL-
15Rα(S40C) (product from partial cleavage, active)
Chain 1: Fc-GGSGGS-IL-15(S162A, L52C)-
GGSGGSEPKENLYFQGGGSGGSGGGS-IL-15Rα(S40C) (SEQ ID NO: 329)
EPKSSDKTHTCPPCPAPELLGGPSVFLFPPKPKDTLMISRTPEVTCVVVDVSHEDPEVKFNWY
VDGVEVHNAKTKPREEQYNSTYRVVSVLTVLHQDWLNGKEYKCKVSNKALPAPIEKTISKAKGQPREPQVYTLPP
SREEMTKNQVSLTCLVKGFYPSDIAVEWESNGQPENNYKTTPPVLDSDGSFFLYSKLTVDKSRWQQGNVFSCSVM
HEALHNHYTQKSLSLSPGK [symbol] NWVNVISDLKKIEDLIQSMHIDATLYTESDVHPSCKVTAMKCFLLELQVI
SCESGDASIHDTVENLIILANNSLSSNGNVTESGCKECEELEEKNIKEFLQSFVHIVQMFINTA [symbol] [symbol] [symbol]
ITCPPPMSVEHADIWVKSYSLYSRERYICNSGFKRKAGTCSLTECVLNKATNVAHWTTPS
LKCIRDPALVHQRPAPPS
Chain 2: Fc-GGSGGS-IL-15(S162A, L52C)-GGSGGSEPKENLYFQ(SEQ ID
NO: 330)
EPKSSDKTHTCPPCPAPELLGGPSVFLFPPKPKDTLMISRTPEVTCVVVDVSHEDPEVKFNWY
VDGVEVHNAKTKPREEQYNSTYRVVSVLTVLHQDWLNGKEYKCKVSNKALPAPIEKTISKAKGQPREPQVYTLPP
SREEMTKNQVSLTCLVKGFYPSDIAVEWESNGQPENNYKTTPPVLDSDGSFFLYSKLTVDKSRWQQGNVFSCSVM
HEALHNHYTQKSLSLSPGK [symbol] NWVNVISDLKKIEDLIQSMHIDATLYTESDVHPSCKVTAMKCFLLELQVI
SCESGDASIHDTVENLIILANNSLSSNGNVTESGCKECEELEEKNIKEFLQSFVHIVQMFINTA

[symbol]

[symbol]

Chain 3: GGGSGGSGGGS-IL-15Rα(S40C) (SEQ ID NO: 331) [symbol]
ITCPPPMSVEHADIWVKSYSLYSRERYICNSGFKRKAGTCSLTECVLNKATN
VAHWTTPSLKCIRDPALVHQRPAPPS
Fc-GGSGGSGGSGGS-IL-15(S162A, L52C)-GGSGGSEPKENLYFQGGGSGGSGGGS-
IL-15Rα(S40C) (SEQ ID NO: 332)
>P1398_Fc-12-L26-PS-R (IL15:S162A, L52C IL15R:S40C) chains 1 and 2
EPKSSDKTHTCPPCPAPELLGGPSVFLFPPKPKDTLMISRTPEVTCVVVDVSHEDPEVKFNWY
VDGVEVHNAKTKPREEQYNSTYRVVSVLTVLHQDWLNGKEYKCKVSNKALPAPIEKTISKAKGQPREPQVYTLPP
SREEMTKNQVSLTCLVKGFYPSDIAVEWESNGQPENNYKTTPPVLDSDGSFFLYSKLTVDKSRWQQGNVFSCSVM
HEALHNHYTQKSLSLSPGK [symbol] NWVNVISDLKKIEDLIQSMHIDATLYTESDVHPSCKVTAMKCFL
LELQVISCESGDASIHDTVENLIILANNSLSSNGNVTESGCKECEELEEKNIKEFLQSFVHIVQMFINTA [symbol] [symbol] [symbol]
ITCPPPMSVEHADIWVKSYSLYSRERYICNSGFKRKAGTCSLTECVLNKATNVA
HWTTPSLKCIRDPALVHQRPAPPS

[0384] Expected Cleavage Products from TEV Cleavage of P1398:

1)_Fc-GGSGGSGGSGGS-IL-15(S162A, L52C)-GGSGGSEPKENLYFQ homodimer
(product from complete cleavage) (SEQ ID NO: 333)
Chains 1 and 2
EPKSSDKTHTCPPCPAPELLGGPSVFLFPPKPKDTLMISRTPEVTCVVVDVSHEDPEVKFNWY
VDGVEVHNAKTKPREEQYNSTYRVVSVLTVLHQDWLNGKEYKCKVSNKALPAPIEKTISKAKGQPREPQVYTLPP
SREEMTKNQVSLTCLVKGFYPSDIAVEWESNGQPENNYKTTPPVLDSDGSFFLYSKLTVDKSRWQQGNVFSCSVM
HEALHNHYTQKSLSLSPGK [symbol] NWVNVISDLKKIEDLIQSMHIDATLYTESDVHPSCKVTAMKCFL
LELQVISCESGDASIHDTVENLIILANNSLSSNGNVTESGCKECEELEEKNIKEFLQSFVHIVQMFINTA

[symbol]

[symbol]

2) GGGSGGSGGGS-IL-15Rα(S40C) homodimer (product from complete
cleavage, active) (SEQ ID NO: 334)
Chains 1 and 2 [symbol]
ITCPPPMSVEHADIWVKSYSLYSRERYICNSGFKRKAGTCSLTECVLNKATN
VAHWTTPSLKCIRDPALVHQRPAPPS
3)_Fc-GGSGGSGGSGGS-IL-15(S162A, L52C)-
GGSGGSEPKENLYFQGGGSGGSGGGS-IL-15Rα(540C)/Fc-GGSGGSGGSGGS-IL-15(S162A,
L52C)-GGSGGSEPKENLYFQ/GGGSGGSGGGS-IL-15Rα(S40C) (product from partial
cleavage, active)(
Chain 1:_Fc-GGSGGSGGSGGS-IL-15(S162A, L52C)-
GGSGGSEPKENLYFQGGGSGGSGGGS-IL-15Rα(S40C) (SEQ ID NO: 335)
EPKSSDKTHTCPPCPAPELLGGPSVFLFPPKPKDTLMISRTPEVTCVVVDVSHEDPEVKFNWY
VDGVEVHNAKTKPREEQYNSTYRVVSVLTVLHQDWLNGKEYKCKVSNKALPAPIEKTISKAKGQPREPQVYTLPP
SREEMTKNQVSLTCLVKGFYPSDIAVEWESNGQPENNYKTTPPVLDSDGSFFLYSKLTVDKSRWQQGNVFSCSVM
HEALHNHYTQKSLSLSPGK [symbol] NWVNVISDLKKIEDLIQSMHIDATLYTESDVHPSCKVTAMKCFL
LELQVISCESGDASIHDTVENLIILANNSLSSNGNVTESGCKECEELEEKNIKEFLQSFVHIVQMFINTA [symbol] [symbol] [symbol]
ITCPPPMSVEHADIWVKSYSLYSRERYICNSGFKRKAGTCSLTECVLNKATNVA
HWTTPSLKCIRDPALVHQRPAPPS
Chain 2:_Fc-GGSGGSGGSGGS-IL-15(S162A, L52C)-GGSGGSEPKENLYFQ (SEQ
ID NO: 336)
EPKSSDKTHTCPPCPAPELLGGPSVFLFPPKPKDTLMISRTPEVTCVVVDVSHEDPEVKFNWY
VDGVEVHNAKTKPREEQYNSTYRVVSVLTVLHQDWLNGKEYKCKVSNKALPAPIEKTISKAKGQPREPQVYTLPP
SREEMTKNQVSLTCLVKGFYPSDIAVEWESNGQPENNYKTTPPVLDSDGSFFLYSKLTVDKSRWQQGNVFSCSVM
HEALHNHYTQKSLSLSPGK [symbol] NWVNVISDLKKIEDLIQSMHIDATLYTESDVHPSCKVTAMKCFL
LELQVISCESGDASIHDTVENLIILANNSLSSNGNVTESGCKECEELEEKNIKEFLQSFVHIVQMFINTAGGSGG
SEPKENLYFQ
Chain 3: GGGSGGSGGGS-IL-15Rα(S40C) (SEQ ID NO: 337) [symbol]
ITCPPPMSVEHADIWVKSYSLYSRERYICNSGFKRKAGTCSLTECVLNKATN
VAHWTTPSLKCIRDPALVHQRPAPPS
Fc-b-GPLGLAGRSANPGPASG-IL-15(S162A)-(GGS)5-IL-15Rα (SEQ ID NO:
3438)
>P1423_Fc-b-PS11-L15R-S162A chains 1 and 2
EPKSSDKTHTCPPCPAPEAAGGPSVFLFPPKPKDTLYITREPEVTCVVVDVSHEDPEVKFNWYVDGVEVHNAKTK
PREEQYNSTYRVVSVLTVLHQDWLNGKEYKCKVSNKALAAPIEKTISKAKGQPREPQVYTLPPSREEMTKNQVSL
TCLVKGFYPSDIAVEWESNGQPENNYKTTPPVLDSDGSFFLYSKLTVDKSRWQQGNVFSCSVMHEALHNHYTQKS
LSLSPGK [symbol] [symbol] NWVNVISDLKKIEDLIQSMHIDATLYTESDVHPSCKVTAMKCELLELQVIS
LESGDASIHDTVENLIILANNSLSSNGNVTESGCKECEELEEKNIKEFLQSFVHIVQMFINTA [symbol] [symbol]
ITCPPPMSVEHADIWVKSYSLYSRERYICNSGFKRKAGTSSLTECVLNKATNVAHWTTPSLKCIRDPALVHQ
RPAPPS
Fc-b-GPLGLAGRSDNHGPASG-IL-15(S162A)-(GGS)5-IL-15Rα (SEQ ID NO:
339)
>P1424_Fc-b-PS12-L15R-S162A chains 1 and 2
EPKSSDKTHTCPPCPAPEAAGGPSVFLFPPKPKDTLYITREPEVTCVVVDVSHEDPEVKFNWYVDGVEVHNAKTK
PREEQYNSTYRVVSVLTVLHQDWLNGKEYKCKVSNKALAAPIEKTISKAKGQPREPQVYTLPPSREEMTKNQVSL
TCLVKGFYPSDIAVEWESNGQPENNYKTTPPVLDSDGSFFLYSKLTVDKSRWQQGNVFSCSVMHEALHNHYTQKS
LSLSPGK [symbol] [symbol] NWVNVISDLKKIEDLIQSMHIDATLYTESDVHPSCKVTAMKCELLELQVIS
LESGDASIHDTVENLIILANNSLSSNGNVTESGCKECEELEEKNIKEFLQSFVHIVQMFINTA [symbol] [symbol]
ITCPPPMSVEHADIWVKSYSLYSRERYICNSGFKRKAGTSSLTECVLNKATNVAHWTTPSLKCIRDPALVHQ
RPAPPS
Fc-b-GPLGLAGRSDNPGPASG-IL-15(S162A)-(GGS)5-IL-15Rα (SEQ ID NO:
340)
>P1425_Fc-b-PS13-L15R-S162A chains 1 and 2
EPKSSDKTHTCPPCPAPEAAGGPSVFLFPPKPKDTLYITREPEVTCVVVDVSHEDPEVKFNWYVDGVEVHNAKTK
PREEQYNSTYRVVSVLTVLHQDWLNGKEYKCKVSNKALAAPIEKTISKAKGQPREPQVYTLPPSREEMTKNQVSL
TCLVKGFYPSDIAVEWESNGQPENNYKTTPPVLDSDGSFFLYSKLTVDKSRWQQGNVFSCSVMHEALHNHYTQKS
LSLSPGK [symbol] [symbol] NWVNVISDLKKIEDLIQSMHIDATLYTESDVHPSCKVTAMKCELLELQVIS
LESGDASIHDTVENLIILANNSLSSNGNVTESGCKECEELEEKNIKEFLQSFVHIVQMFINTA [symbol] [symbol]
ITCPPPMSVEHADIWVKSYSLYSRERYICNSGFKRKAGTSSLTECVLNKATNVAHWTTPSLKCIRDPALVHQ
RPAPPS
Fc-b-GPLGLAGRSENPGPASG-IL-15(S162A)-(GGS)5-IL-15Rα (SEQ ID NO:
341)
>P1426_Fc-b-PS14-L15R-S162A chains 1 and 2
EPKSSDKTHTCPPCPAPEAAGGPSVFLFPPKPKDTLYITREPEVTCVVVDVSHEDPEVKFNWYVDGVEVHNAKTK
PREEQYNSTYRVVSVLTVLHQDWLNGKEYKCKVSNKALAAPIEKTISKAKGQPREPQVYTLPPSREEMTKNQVSL
TCLVKGFYPSDIAVEWESNGQPENNYKTTPPVLDSDGSFFLYSKLTVDKSRWQQGNVFSCSVMHEALHNHYTQKS
LSLSPGK [symbol] [symbol] NWVNVISDLKKIEDLIQSMHIDATLYTESDVHPSCKVTAMKCELLELQVIS
LESGDASIHDTVENLIILANNSLSSNGNVTESGCKECEELEEKNIKEFLQSFVHIVQMFINTA [symbol] [symbol]
ITCPPPMSVEHADIWVKSYSLYSRERYICNSGFKRKAGTSSLTECVLNKATNVAHWTTPSLKCIRDPALVHQ
RPAPPS
Fc-b-GPLGLAGRSDNLGPASG-IL-15(S162A)-(GGS)5-IL-15Rα (SEQ ID NO:
342)
>P1427_Fc-b-PS15-L15R-S162A chains 1 and 2
EPKSSDKTHTCPPCPAPEAAGGPSVFLFPPKPKDTLYITREPEVTCVVVDVSHEDPEVKFNWYVDGVEVHNAKTK
PREEQYNSTYRVVSVLTVLHQDWLNGKEYKCKVSNKALAAPIEKTISKAKGQPREPQVYTLPPSREEMTKNQVSL
TCLVKGFYPSDIAVEWESNGQPENNYKTTPPVLDSDGSFFLYSKLTVDKSRWQQGNVFSCSVMHEALHNHYTQKS
LSLSPGK [symbol] [symbol] NWVNVISDLKKIEDLIQSMHIDATLYTESDVHPSCKVTAMKCELLELQVIS
LESGDASIHDTVENLIILANNSLSSNGNVTESGCKECEELEEKNIKEFLQSFVHIVQMFINTA [symbol] [symbol]
ITCPPPMSVEHADIWVKSYSLYSRERYICNSGFKRKAGTSSLTECVLNKATNVAHWTTPSLKCIRDPALVHQ
RPAPPS
Fc-b-GPLGLAGRNAQVGPASG-IL-15(S162A)-(GGS)5-IL-15Rα (SEQ ID NO:
343)
>P1428_Fc-b-PS16-L15R-S162A chains 1 and 2
EPKSSDKTHTCPPCPAPEAAGGPSVFLFPPKPKDTLYITREPEVTCVVVDVSHEDPEVKFNWYVDGVEVHNAKTK
PREEQYNSTYRVVSVLTVLHQDWLNGKEYKCKVSNKALAAPIEKTISKAKGQPREPQVYTLPPSREEMTKNQVSL
TCLVKGFYPSDIAVEWESNGQPENNYKTTPPVLDSDGSFFLYSKLTVDKSRWQQGNVFSCSVMHEALHNHYTQKS
LSLSPGK [symbol] [symbol] NWVNVISDLKKIEDLIQSMHIDATLYTESDVHPSCKVTAMKCELLELQVIS
LESGDASIHDTVENLIILANNSLSSNGNVTESGCKECEELEEKNIKEFLQSFVHIVQMFINTA [symbol] [symbol]
ITCPPPMSVEHADIWVKSYSLYSRERYICNSGFKRKAGTSSLTECVLNKATNVAHWTTPSLKCIRDPALVHQ
RPAPPS
TEV cleavage site (SEQ ID NO: 344)
ENLYFQG
Linker sequence (SEQ ID NO: 345)
GGSGGSGGSGGSGGS
Exemplary cleavable linker (SEQ ID NO: 346)
GSENLYFQGGS
Fc-GSLSGRSDNAGS-IL-15-(GGS)3-IL-15Rα (SEQ ID NO: 347)
>P1471_Fc-PS17-L15R chains 1 and 2
EPKSSDKTHTCPPCPAPELLGGPSVFLFPPKPKDTLMISRTPEVTCVVVDVSHEDPEVKFNWY
VDGVEVHNAKTKPREEQYNSTYRVVSVLTVLHQDWLNGKEYKCKVSNKALPAPIEKTISKAKGQPREPQVYTLPP
SREEMTKNQVSLTCLVKGFYPSDIAVEWESNGQPENNYKTTPPVLDSDGSFFLYSKLTVDKSRWQQGNVFSCSVM
HEALHNHYTQKSLSLSPGKGSLSGRSDNAGSNWVNVISDLKKIEDLIQSMHIDATLYTESDVHPSCKVTAMKCFL
LELQVISLESGDASIHDTVENLIILANNSLSSNGNVTESGCKECEELEEKNIKEFLQSFVHIVQMFINTSGGSGG
SGGSGGSGGSITCPPPMSVEHADIWVKSYSLYSRERYICNSGFKRKAGTSSLTECVLNKATNVAHWTTPSLKCIR
DPALVHQRPAPPS
Fc-GSLSGRSDNDGS-IL-15-(GGS)3-IL-15Rα (SEQ ID NO: 348)
>P1472_Fc-PS18-L15R Chains 1 and 2
EPKSSDKTHTCPPCPAPELLGGPSVFLFPPKPKDTLMISRTPEVTCVVVDVSHEDPEVKFNWY
VDGVEVHNAKTKPREEQYNSTYRVVSVLTVLHQDWLNGKEYKCKVSNKALPAPIEKTISKAKGQPREPQVYTLPP
SREEMTKNQVSLTCLVKGFYPSDIAVEWESNGQPENNYKTTPPVLDSDGSFFLYSKLTVDKSRWQQGNVFSCSVM
HEALHNHYTQKSLSLSPGKGSLSGRSDNDGSNWVNVISDLKKIEDLIQSMHIDATLYTESDVHPSCKVTAMKCFL
LELQVISLESGDASIHDTVENLIILANNSLSSNGNVTESGCKECEELEEKNIKEFLQSFVHIVQMFINTSGGSGG
SGGSGGSGGSITCPPPMSVEHADIWVKSYSLYSRERYICNSGFKRKAGTSSLTECVLNKATNVAHWTTPSLKCIR
DPALVHQRPAPPS
Fc-GSLSGRSDNEGS-IL-15-(GGS)3-IL-15Rα (SEQ ID NO: 349)
>P1473_Fc-PS19-L15R Chains 1 and 2
EPKSSDKTHTCPPCPAPELLGGPSVFLFPPKPKDTLMISRTPEVTCVVVDVSHEDPEVKFNWY
VDGVEVHNAKTKPREEQYNSTYRVVSVLTVLHQDWLNGKEYKCKVSNKALPAPIEKTISKAKGQPREPQVYTLPP
SREEMTKNQVSLTCLVKGFYPSDIAVEWESNGQPENNYKTTPPVLDSDGSFFLYSKLTVDKSRWQQGNVFSCSVM
HEALHNHYTQKSLSLSPGKGSLSGRSDNEGSNWVNVISDLKKIEDLIQSMHIDATLYTESDVHPSCKVTAMKCFL
LELQVISLESGDASIHDTVENLIILANNSLSSNGNVTESGCKECEELEEKNIKEFLQSFVHIVQMFINTSGGSGG
SGGSGGSGGSITCPPPMSVEHADIWVKSYSLYSRERYICNSGFKRKAGTSSLTECVLNKATNVAHWTTPSLKCIR
DPALVHQRPAPPS
Fc-GSLSGRSDNEGS-IL-15-(GGS)3-IL-15Rα (SEQ ID NO: 350)
>P1474_Fc-PS20-L15R Chains 1 and 2
EPKSSDKTHTCPPCPAPELLGGPSVFLFPPKPKDTLMISRTPEVTCVVVDVSHEDPEVKFNWY
VDGVEVHNAKTKPREEQYNSTYRVVSVLTVLHQDWLNGKEYKCKVSNKALPAPIEKTISKAKGQPREPQVYTLPP
SREEMTKNQVSLTCLVKGFYPSDIAVEWESNGQPENNYKTTPPVLDSDGSFFLYSKLTVDKSRWQQGNVFSCSVM
HEALHNHYTQKSLSLSPGKGSLSGRSDNEGSNWVNVISDLKKIEDLIQSMHIDATLYTESDVHPSCKVTAMKCFL
LELQVISLESGDASIHDTVENLIILANNSLSSNGNVTESGCKECEELEEKNIKEFLQSFVHIVQMFINTSGGSGG
SGGSGGSGGSITCPPPMSVEHADIWVKSYSLYSRERYICNSGFKRKAGTSSLTECVLNKATNVAHWTTPSLKCIR
DPALVHQRPAPPS
Fc-GSLSGRSDNGGS-IL-15-(GGS)3-IL-15Rα (SEQ ID NO: 351)
>P1475_Fc-PS21-L15R Chains 1 and 2
EPKSSDKTHTCPPCPAPELLGGPSVFLFPPKPKDTLMISRTPEVTCVVVDVSHEDPEVKFNWY
VDGVEVHNAKTKPREEQYNSTYRVVSVLTVLHQDWLNGKEYKCKVSNKALPAPIEKTISKAKGQPREPQVYTLPP
SREEMTKNQVSLTCLVKGFYPSDIAVEWESNGQPENNYKTTPPVLDSDGSFFLYSKLTVDKSRWQQGNVFSCSVM
HEALHNHYTQKSLSLSPGKGSLSGRSDNGGSNWVNVISDLKKIEDLIQSMHIDATLYTESDVHPSCKVTAMKCFL
LELQVISLESGDASIHDTVENLIILANNSLSSNGNVTESGCKECEELEEKNIKEFLQSFVHIVQMFINTSGGSGG
SGGSGGSGGSITCPPPMSVEHADIWVKSYSLYSRERYICNSGFKRKAGTSSLTECVLNKATNVAHWTTPSLKCIR
DPALVHQRPAPPS
c-GSLSGRSDNIGS-IL-15-(GGS)3-IL-15Rα (SEQ ID NO: 352)
>P1476_Fc-PS22-L15R Chains 1 and 2
EPKSSDKTHTCPPCPAPELLGGPSVFLFPPKPKDTLMISRTPEVTCVVVDVSHEDPEVKFNWY
VDGVEVHNAKTKPREEQYNSTYRVVSVLTVLHQDWLNGKEYKCKVSNKALPAPIEKTISKAKGQPREPQVYTLPP
SREEMTKNQVSLTCLVKGFYPSDIAVEWESNGQPENNYKTTPPVLDSDGSFFLYSKLTVDKSRWQQGNVFSCSVM
HEALHNHYTQKSLSLSPGKGSLSGRSDNIGSNWVNVISDLKKIEDLIQSMHIDATLYTESDVHPSCKVTAMKCFL
LELQVISLESGDASIHDTVENLIILANNSLSSNGNVTESGCKECEELEEKNIKEFLQSFVHIVQMFINTSGGSGG
SGGSGGSGGSITCPPPMSVEHADIWVKSYSLYSRERYICNSGFKRKAGTSSLTECVLNKATNVAHWTTPSLKCIR
DPALVHQRPAPPS
Fc-GSLSGRSDNKGS-IL-15-(GGS)3-IL-15Rα (SEQ ID NO: 353)
>P1477_Fc-PS23-L15R Chains 1 and 2
EPKSSDKTHTCPPCPAPELLGGPSVFLFPPKPKDTLMISRTPEVTCVVVDVSHEDPEVKFNWY
VDGVEVHNAKTKPREEQYNSTYRVVSVLTVLHQDWLNGKEYKCKVSNKALPAPIEKTISKAKGQPREPQVYTLPP
SREEMTKNQVSLTCLVKGFYPSDIAVEWESNGQPENNYKTTPPVLDSDGSFFLYSKLTVDKSRWQQGNVFSCSVM
HEALHNHYTQKSLSLSPGKGSLSGRSDNKGSNWVNVISDLKKIEDLIQSMHIDATLYTESDVHPSCKVTAMKCFL
LELQVISLESGDASIHDTVENLIILANNSLSSNGNVTESGCKECEELEEKNIKEFLQSFVHIVQMFINTSGGSGG
SGGSGGSGGSITCPPPMSVEHADIWVKSYSLYSRERYICNSGFKRKAGTSSLTECVLNKATNVAHWTTPSLKCIR
DPALVHQRPAPPS
Fc-GSLSGRSDNLGS-IL-15-(GGS)3-IL-15Rα (SEQ ID NO: 354)
>P1478_Fc-PS24-L15R Chains 1 and 2
EPKSSDKTHTCPPCPAPELLGGPSVFLFPPKPKDTLMISRTPEVTCVVVDVSHEDPEVKFNWY
VDGVEVHNAKTKPREEQYNSTYRVVSVLTVLHQDWLNGKEYKCKVSNKALPAPIEKTISKAKGQPREPQVYTLPP
SREEMTKNQVSLTCLVKGFYPSDIAVEWESNGQPENNYKTTPPVLDSDGSFFLYSKLTVDKSRWQQGNVFSCSVM
HEALHNHYTQKSLSLSPGKGSLSGRSDNLGSNWVNVISDLKKIEDLIQSMHIDATLYTESDVHPSCKVTAMKCFL
LELQVISLESGDASIHDTVENLIILANNSLSSNGNVTESGCKECEELEEKNIKEFLQSFVHIVQMFINTSGGSGG
SGGSGGSGGSITCPPPMSVEHADIWVKSYSLYSRERYICNSGFKRKAGTSSLTECVLNKATNVAHWTTPSLKCIR
DPALVHQRPAPPS
Fc-GSLSGRSDNMGS-IL-15-(GGS)3-IL-15Rα (SEQ ID NO: 355)
>P1479_Fc-PS25-L15R
EPKSSDKTHTCPPCPAPELLGGPSVFLFPPKPKDTLMISRTPEVTCVVVDVSHEDPEVKFNWY
VDGVEVHNAKTKPREEQYNSTYRVVSVLTVLHQDWLNGKEYKCKVSNKALPAPIEKTISKAKGQPREPQVYTLPP
SREEMTKNQVSLTCLVKGFYPSDIAVEWESNGQPENNYKTTPPVLDSDGSFFLYSKLTVDKSRWQQGNVFSCSVM
HEALHNHYTQKSLSLSPGKGSLSGRSDNMGSNWVNVISDLKKIEDLIQSMHIDATLYTESDVHPSCKVTAMKCFL
LELQVISLESGDASIHDTVENLIILANNSLSSNGNVTESGCKECEELEEKNIKEFLQSFVHIVQMFINTSGGSGG
SGGSGGSGGSITCPPPMSVEHADIWVKSYSLYSRERYICNSGFKRKAGTSSLTECVLNKATNVAHWTTPSLKCIR
DPALVHQRPAPPS
Fc-GSLSGRSDNNGS-IL-15-(GGS)3-IL-15Rα (SEQ ID NO: 356)
>P1480_Fc-PS26-L15R
EPKSSDKTHTCPPCPAPELLGGPSVFLFPPKPKDTLMISRTPEVTCVVVDVSHEDPEVKFNWY
VDGVEVHNAKTKPREEQYNSTYRVVSVLTVLHQDWLNGKEYKCKVSNKALPAPIEKTISKAKGQPREPQVYTLPP
SREEMTKNQVSLTCLVKGFYPSDIAVEWESNGQPENNYKTTPPVLDSDGSFFLYSKLTVDKSRWQQGNVFSCSVM
HEALHNHYTQKSLSLSPGKGSLSGRSDNNGSNWVNVISDLKKIEDLIQSMHIDATLYTESDVHPSCKVTAMKCFL
LELQVISLESGDASIHDTVENLIILANNSLSSNGNVTESGCKECEELEEKNIKEFLQSFVHIVQMFINTSGGSGG
SGGSGGSGGSITCPPPMSVEHADIWVKSYSLYSRERYICNSGFKRKAGTSSLTECVLNKATNVAHWTTPSLKCIR
DPALVHQRPAPPS
Fc-GSLSGRSDNPGS-IL-15-(GGS)3-IL-15Rα (SEQ ID NO: 357)
>P1481_Fc-PS27-L15R
EPKSSDKTHTCPPCPAPELLGGPSVFLFPPKPKDTLMISRTPEVTCVVVDVSHEDPEVKFNWY
VDGVEVHNAKTKPREEQYNSTYRVVSVLTVLHQDWLNGKEYKCKVSNKALPAPIEKTISKAKGQPREPQVYTLPP
SREEMTKNQVSLTCLVKGFYPSDIAVEWESNGQPENNYKTTPPVLDSDGSFFLYSKLTVDKSRWQQGNVFSCSVM
HEALHNHYTQKSLSLSPGKGSLSGRSDNPGSNWVNVISDLKKIEDLIQSMHIDATLYTESDVHPSCKVTAMKCFL
LELQVISLESGDASIHDTVENLIILANNSLSSNGNVTESGCKECEELEEKNIKEFLQSFVHIVQMFINTSGGSGG
SGGSGGSGGSITCPPPMSVEHADIWVKSYSLYSRERYICNSGFKRKAGTSSLTECVLNKATNVAHWTTPSLKCIR
DPALVHQRPAPPS
Fc-GSLSGRSDNQGS-IL-15-(GGS)3-IL-15Rα (SEQ ID NO: 358)
>P1482_Fc-PS28-L15R
EPKSSDKTHTCPPCPAPELLGGPSVFLFPPKPKDTLMISRTPEVTCVVVDVSHEDPEVKFNWY
VDGVEVHNAKTKPREEQYNSTYRVVSVLTVLHQDWLNGKEYKCKVSNKALPAPIEKTISKAKGQPREPQVYTLPP
SREEMTKNQVSLTCLVKGFYPSDIAVEWESNGQPENNYKTTPPVLDSDGSFFLYSKLTVDKSRWQQGNVFSCSVM
HEALHNHYTQKSLSLSPGKGSLSGRSDNQGSNWVNVISDLKKIEDLIQSMHIDATLYTESDVHPSCKVTAMKCFL
LELQVISLESGDASIHDTVENLIILANNSLSSNGNVTESGCKECEELEEKNIKEFLQSFVHIVQMFINTSGGSGG
SGGSGGSGGSITCPPPMSVEHADIWVKSYSLYSRERYICNSGFKRKAGTSSLTECVLNKATNVAHWTTPSLKCIR
DPALVHQRPAPPS
Fc-GSLSGRSDNRGS-IL-15-(GGS)3-IL-15Rα (SEQ ID NO: 359)
>P1483_Fc-PS29-L15R
EPKSSDKTHTCPPCPAPELLGGPSVFLFPPKPKDTLMISRTPEVTCVVVDVSHEDPEVKFNWY
VDGVEVHNAKTKPREEQYNSTYRVVSVLTVLHQDWLNGKEYKCKVSNKALPAPIEKTISKAKGQPREPQVYTLPP
SREEMTKNQVSLTCLVKGFYPSDIAVEWESNGQPENNYKTTPPVLDSDGSFFLYSKLTVDKSRWQQGNVFSCSVM
HEALHNHYTQKSLSLSPGKGSLSGRSDNRGSNWVNVISDLKKIEDLIQSMHIDATLYTESDVHPSCKVTAMKCFL
LELQVISLESGDASIHDTVENLIILANNSLSSNGNVTESGCKECEELEEKNIKEFLQSFVHIVQMFINTSGGSGG
SGGSGGSGGSITCPPPMSVEHADIWVKSYSLYSRERYICNSGFKRKAGTSSLTECVLNKATNVAHWTTPSLKCIR
DPALVHQRPAPPS
Fc-GSLSGRSDNSGS-IL-15-(GGS)3-IL-15Rα (SEQ ID NO: 360)
>P1484_Fc-PS30-L15R
EPKSSDKTHTCPPCPAPELLGGPSVFLFPPKPKDTLMISRTPEVTCVVVDVSHEDPEVKFNWY
VDGVEVHNAKTKPREEQYNSTYRVVSVLTVLHQDWLNGKEYKCKVSNKALPAPIEKTISKAKGQPREPQVYTLPP
SREEMTKNQVSLTCLVKGFYPSDIAVEWESNGQPENNYKTTPPVLDSDGSFFLYSKLTVDKSRWQQGNVFSCSVM
HEALHNHYTQKSLSLSPGKGSLSGRSDNSGSNWVNVISDLKKIEDLIQSMHIDATLYTESDVHPSCKVTAMKCFL
LELQVISLESGDASIHDTVENLIILANNSLSSNGNVTESGCKECEELEEKNIKEFLQSFVHIVQMFINTSGGSGG
SGGSGGSGGSITCPPPMSVEHADIWVKSYSLYSRERYICNSGFKRKAGTSSLTECVLNKATNVAHWTTPSLKCIR
DPALVHQRPAPPS
Fc-GSLSGRSDNTGS-IL-15-(GGS)3-IL-15Rα (SEQ ID NO: 361)
>P1485_Fc-PS31-L15R
EPKSSDKTHTCPPCPAPELLGGPSVFLFPPKPKDTLMISRTPEVTCVVVDVSHEDPEVKFNWY
VDGVEVHNAKTKPREEQYNSTYRVVSVLTVLHQDWLNGKEYKCKVSNKALPAPIEKTISKAKGQPREPQVYTLPP
SREEMTKNQVSLTCLVKGFYPSDIAVEWESNGQPENNYKTTPPVLDSDGSFFLYSKLTVDKSRWQQGNVFSCSVM
HEALHNHYTQKSLSLSPGKGSLSGRSDNTGSNWVNVISDLKKIEDLIQSMHIDATLYTESDVHPSCKVTAMKCFL
LELQVISLESGDASIHDTVENLIILANNSLSSNGNVTESGCKECEELEEKNIKEFLQSFVHIVQMFINTSGGSGG
SGGSGGSGGSITCPPPMSVEHADIWVKSYSLYSRERYICNSGFKRKAGTSSLTECVLNKATNVAHWTTPSLKCIR
DPALVHQRPAPPS
Fc-GSLSGRSDNVGS-IL-15-(GGS)3-IL-15Rα (SEQ ID NO: 362)
>P1486_Fc-32-L15R
EPKSSDKTHTCPPCPAPELLGGPSVFLFPPKPKDTLMISRTPEVTCVVVDVSHEDPEVKFNWY
VDGVEVHNAKTKPREEQYNSTYRVVSVLTVLHQDWLNGKEYKCKVSNKALPAPIEKTISKAKGQPREPQVYTLPP
SREEMTKNQVSLTCLVKGFYPSDIAVEWESNGQPENNYKTTPPVLDSDGSFFLYSKLTVDKSRWQQGNVFSCSVM
HEALHNHYTQKSLSLSPGKGSLSGRSDNVGSNWVNVISDLKKIEDLIQSMHIDATLYTESDVHPSCKVTAMKCFL
LELQVISLESGDASIHDTVENLIILANNSLSSNGNVTESGCKECEELEEKNIKEFLQSFVHIVQMFINTSGGSGG
SGGSGGSGGSITCPPPMSVEHADIWVKSYSLYSRERYICNSGFKRKAGTSSLTECVLNKATNVAHWTTPSLKCIR
DPALVHQRPAPPS
Fc-GSLSGRSDNWGS-IL-15-(GGS)3-IL-15Rα (SEQ ID NO: 363)
>P1487_Fc-PS33-L15R
EPKSSDKTHTCPPCPAPELLGGPSVFLFPPKPKDTLMISRTPEVTCVVVDVSHEDPEVKFNWY
VDGVEVHNAKTKPREEQYNSTYRVVSVLTVLHQDWLNGKEYKCKVSNKALPAPIEKTISKAKGQPREPQVYTLPP
SREEMTKNQVSLTCLVKGFYPSDIAVEWESNGQPENNYKTTPPVLDSDGSFFLYSKLTVDKSRWQQGNVFSCSVM
HEALHNHYTQKSLSLSPGKGSLSGRSDNWGSNWVNVISDLKKIEDLIQSMHIDATLYTESDVHPSCKVTAMKCFL
LELQVISLESGDASIHDTVENLIILANNSLSSNGNVTESGCKECEELEEKNIKEFLQSFVHIVQMFINTSGGSGG
SGGSGGSGGSITCPPPMSVEHADIWVKSYSLYSRERYICNSGFKRKAGTSSLTECVLNKATNVAHWTTPSLKCIR
DPALVHQRPAPPS
Fc-GSLSGRSDNYGS-IL-15-(GGS)3-IL-15Rα (SEQ ID NO: 364)
22P1488_Fc-PS34-L15R
EPKSSDKTHTCPPCPAPELLGGPSVFLFPPKPKDTLMISRTPEVTCVVVDVSHEDPEVKFNWY
VDGVEVHNAKTKPREEQYNSTYRVVSVLTVLHQDWLNGKEYKCKVSNKALPAPIEKTISKAKGQPREPQVYTLPP
SREEMTKNQVSLTCLVKGFYPSDIAVEWESNGQPENNYKTTPPVLDSDGSFFLYSKLTVDKSRWQQGNVFSCSVM
HEALHNHYTQKSLSLSPGKGSLSGRSDNYGSNWVNVISDLKKIEDLIQSMHIDATLYTESDVHPSCKVTAMKCFL
LELQVISLESGDASIHDTVENLIILANNSLSSNGNVTESGCKECEELEEKNIKEFLQSFVHIVQMFINTSGGSGG
SGGSGGSGGSITCPPPMSVEHADIWVKSYSLYSRERYICNSGFKRKAGTSSLTECVLNKATNVAHWTTPSLKCIR
DPALVHQRPAPPS
Fc-GSLSGRSANDGS-IL-15-(GGS)3-IL-15Rα (SEQ ID NO: 365)
>P1489_Fc-PS35-L15R
EPKSSDKTHTCPPCPAPELLGGPSVFLFPPKPKDTLMISRTPEVTCVVVDVSHEDPEVKFNWY
VDGVEVHNAKTKPREEQYNSTYRVVSVLTVLHQDWLNGKEYKCKVSNKALPAPIEKTISKAKGQPREPQVYTLPP
SREEMTKNQVSLTCLVKGFYPSDIAVEWESNGQPENNYKTTPPVLDSDGSFFLYSKLTVDKSRWQQGNVFSCSVM
HEALHNHYTQKSLSLSPGKGSLSGRSANDGSNWVNVISDLKKIEDLIQSMHIDATLYTESDVHPSCKVTAMKCFL
LELQVISLESGDASIHDTVENLIILANNSLSSNGNVTESGCKECEELEEKNIKEFLQSFVHIVQMFINTSGGSGG
SGGSGGSGGSITCPPPMSVEHADIWVKSYSLYSRERYICNSGFKRKAGTSSLTECVLNKATNVAHWTTPSLKCIR
DPALVHQRPAPPS
Fc-GSLSGRSANEGS-IL-15-(GGS)3-IL-15Rα (SEQ ID NO: 366)
>P1490_Fc-PS36-L15R
EPKSSDKTHTCPPCPAPELLGGPSVFLFPPKPKDTLMISRTPEVTCVVVDVSHEDPEVKFNWY
VDGVEVHNAKTKPREEQYNSTYRVVSVLTVLHQDWLNGKEYKCKVSNKALPAPIEKTISKAKGQPREPQVYTLPP
SREEMTKNQVSLTCLVKGFYPSDIAVEWESNGQPENNYKTTPPVLDSDGSFFLYSKLTVDKSRWQQGNVFSCSVM
HEALHNHYTQKSLSLSPGKGSLSGRSANEGSNWVNVISDLKKIEDLIQSMHIDATLYTESDVHPSCKVTAMKCFL
LELQVISLESGDASIHDTVENLIILANNSLSSNGNVTESGCKECEELEEKNIKEFLQSFVHIVQMFINTSGGSGG
SGGSGGSGGSITCPPPMSVEHADIWVKSYSLYSRERYICNSGFKRKAGTSSLTECVLNKATNVAHWTTPSLKCIR
DPALVHQRPAPPS
Fc-GSLSGRSANFGS-IL-15-(GGS)3-IL-15Rα (SEQ ID NO: 367)
>P1491_Fc-PS37-L15R
EPKSSDKTHTCPPCPAPELLGGPSVFLFPPKPKDTLMISRTPEVTCVVVDVSHEDPEVKFNWY
VDGVEVHNAKTKPREEQYNSTYRVVSVLTVLHQDWLNGKEYKCKVSNKALPAPIEKTISKAKGQPREPQVYTLPP
SREEMTKNQVSLTCLVKGFYPSDIAVEWESNGQPENNYKTTPPVLDSDGSFFLYSKLTVDKSRWQQGNVFSCSVM
HEALHNHYTQKSLSLSPGKGSLSGRSANFGSNWVNVISDLKKIEDLIQSMHIDATLYTESDVHPSCKVTAMKCFL
LELQVISLESGDASIHDTVENLIILANNSLSSNGNVTESGCKECEELEEKNIKEFLQSFVHIVQMFINTSGGSGG
SGGSGGSGGSITCPPPMSVEHADIWVKSYSLYSRERYICNSGFKRKAGTSSLTECVLNKATNVAHWTTPSLKCIR
DPALVHQRPAPPS
Fc-GSLSGRSANGGS-IL-15-(GGS)3-IL-15Rα (SEQ ID NO: 368)
>P1492_Fc-PS38-L15R
EPKSSDKTHTCPPCPAPELLGGPSVFLFPPKPKDTLMISRTPEVTCVVVDVSHEDPEVKFNWY
VDGVEVHNAKTKPREEQYNSTYRVVSVLTVLHQDWLNGKEYKCKVSNKALPAPIEKTISKAKGQPREPQVYTLPP
SREEMTKNQVSLTCLVKGFYPSDIAVEWESNGQPENNYKTTPPVLDSDGSFFLYSKLTVDKSRWQQGNVFSCSVM
HEALHNHYTQKSLSLSPGKGSLSGRSANGGSNWVNVISDLKKIEDLIQSMHIDATLYTESDVHPSCKVTAMKCFL
LELQVISLESGDASIHDTVENLIILANNSLSSNGNVTESGCKECEELEEKNIKEFLQSFVHIVQMFINTSGGSGG
SGGSGGSGGSITCPPPMSVEHADIWVKSYSLYSRERYICNSGFKRKAGTSSLTECVLNKATNVAHWTTPSLKCIR
DPALVHQRPAPPS
Fc-GSLSGRSANHGS-IL-15-(GGS)3-IL-15Rα (SEQ ID NO: 369)
>P1493_Fc-PS39-L15R
EPKSSDKTHTCPPCPAPELLGGPSVFLFPPKPKDTLMISRTPEVTCVVVDVSHEDPEVKFNWY
VDGVEVHNAKTKPREEQYNSTYRVVSVLTVLHQDWLNGKEYKCKVSNKALPAPIEKTISKAKGQPREPQVYTLPP
SREEMTKNQVSLTCLVKGFYPSDIAVEWESNGQPENNYKTTPPVLDSDGSFFLYSKLTVDKSRWQQGNVFSCSVM
HEALHNHYTQKSLSLSPGKGSLSGRSANHGSNWVNVISDLKKIEDLIQSMHIDATLYTESDVHPSCKVTAMKCFL
LELQVISLESGDASIHDTVENLIILANNSLSSNGNVTESGCKECEELEEKNIKEFLQSFVHIVQMFINTSGGSGG
SGGSGGSGGSITCPPPMSVEHADIWVKSYSLYSRERYICNSGFKRKAGTSSLTECVLNKATNVAHWTTPSLKCIR
DPALVHQRPAPPS
Fc-GSLSGRSANIGS-IL-15-(GGS)3-IL-15Rα (SEQ ID NO: 370)
>P1494_Fc-PS40-L15R
EPKSSDKTHTCPPCPAPELLGGPSVFLFPPKPKDTLMISRTPEVTCVVVDVSHEDPEVKFNWY
VDGVEVHNAKTKPREEQYNSTYRVVSVLTVLHQDWLNGKEYKCKVSNKALPAPIEKTISKAKGQPREPQVYTLPP
SREEMTKNQVSLTCLVKGFYPSDIAVEWESNGQPENNYKTTPPVLDSDGSFFLYSKLTVDKSRWQQGNVFSCSVM
HEALHNHYTQKSLSLSPGKGSLSGRSANIGSNWVNVISDLKKIEDLIQSMHIDATLYTESDVHPSCKVTAMKCFL
LELQVISLESGDASIHDTVENLIILANNSLSSNGNVTESGCKECEELEEKNIKEFLQSFVHIVQMFINTSGGSGG
SGGSGGSGGSITCPPPMSVEHADIWVKSYSLYSRERYICNSGFKRKAGTSSLTECVLNKATNVAHWTTPSLKCIR
DPALVHQRPAPPS
Fc-GSLSGRSANKGS-IL-15-(GGS)3-IL-15Rα (SEQ ID NO: 371)
>P1495_Fc-PS41-L15R
EPKSSDKTHTCPPCPAPELLGGPSVFLFPPKPKDTLMISRTPEVTCVVVDVSHEDPEVKFNWY
VDGVEVHNAKTKPREEQYNSTYRVVSVLTVLHQDWLNGKEYKCKVSNKALPAPIEKTISKAKGQPREPQVYTLPP
SREEMTKNQVSLTCLVKGFYPSDIAVEWESNGQPENNYKTTPPVLDSDGSFFLYSKLTVDKSRWQQGNVFSCSVM
HEALHNHYTQKSLSLSPGKGSLSGRSANKGSNWVNVISDLKKIEDLIQSMHIDATLYTESDVHPSCKVTAMKCFL
LELQVISLESGDASIHDTVENLIILANNSLSSNGNVTESGCKECEELEEKNIKEFLQSFVHIVQMFINTSGGSGG
SGGSGGSGGSITCPPPMSVEHADIWVKSYSLYSRERYICNSGFKRKAGTSSLTECVLNKATNVAHWTTPSLKCIR
DPALVHQRPAPPS
Fc-GSLSGRSANLGS-IL-15-(GGS)3-IL-15Rα (SEQ ID NO: 372)
>P1496_Fc-PS42-L15R
EPKSSDKTHTCPPCPAPELLGGPSVFLFPPKPKDTLMISRTPEVTCVVVDVSHEDPEVKFNWY
VDGVEVHNAKTKPREEQYNSTYRVVSVLTVLHQDWLNGKEYKCKVSNKALPAPIEKTISKAKGQPREPQVYTLPP
SREEMTKNQVSLTCLVKGFYPSDIAVEWESNGQPENNYKTTPPVLDSDGSFFLYSKLTVDKSRWQQGNVFSCSVM
HEALHNHYTQKSLSLSPGKGSLSGRSANLGSNWVNVISDLKKIEDLIQSMHIDATLYTESDVHPSCKVTAMKCFL
LELQVISLESGDASIHDTVENLIILANNSLSSNGNVTESGCKECEELEEKNIKEFLQSFVHIVQMFINTSGGSGG
SGGSGGSGGSITCPPPMSVEHADIWVKSYSLYSRERYICNSGFKRKAGTSSLTECVLNKATNVAHWTTPSLKCIR
DPALVHQRPAPPS
Fc-GSLSGRSANMGS-IL-15-(GGS)3-IL-15Rα (SEQ ID NO: 373)
>P1497_Fc-PS43-L15R
EPKSSDKTHTCPPCPAPELLGGPSVFLFPPKPKDTLMISRTPEVTCVVVDVSHEDPEVKFNWY
VDGVEVHNAKTKPREEQYNSTYRVVSVLTVLHQDWLNGKEYKCKVSNKALPAPIEKTISKAKGQPREPQVYTLPP
SREEMTKNQVSLTCLVKGFYPSDIAVEWESNGQPENNYKTTPPVLDSDGSFFLYSKLTVDKSRWQQGNVFSCSVM
HEALHNHYTQKSLSLSPGKGSLSGRSANMGSNWVNVISDLKKIEDLIQSMHIDATLYTESDVHPSCKVTAMKCFL
LELQVISLESGDASIHDTVENLIILANNSLSSNGNVTESGCKECEELEEKNIKEFLQSFVHIVQMFINTSGGSGG
SGGSGGSGGSITCPPPMSVEHADIWVKSYSLYSRERYICNSGFKRKAGTSSLTECVLNKATNVAHWTTPSLKCIR
DPALVHQRPAPPS
Fc-GSLSGRSANNGS-IL-15-(GGS)3-IL-15Rα (SEQ ID NO: 374)
>P1498_Fc-PS44-L15R
EPKSSDKTHTCPPCPAPELLGGPSVFLFPPKPKDTLMISRTPEVTCVVVDVSHEDPEVKFNWY
VDGVEVHNAKTKPREEQYNSTYRVVSVLTVLHQDWLNGKEYKCKVSNKALPAPIEKTISKAKGQPREPQVYTLPP
SREEMTKNQVSLTCLVKGFYPSDIAVEWESNGQPENNYKTTPPVLDSDGSFFLYSKLTVDKSRWQQGNVFSCSVM
HEALHNHYTQKSLSLSPGKGSLSGRSANNGSNWVNVISDLKKIEDLIQSMHIDATLYTESDVHPSCKVTAMKCFL
LELQVISLESGDASIHDTVENLIILANNSLSSNGNVTESGCKECEELEEKNIKEFLQSFVHIVQMFINTSGGSGG
SGGSGGSGGSITCPPPMSVEHADIWVKSYSLYSRERYICNSGFKRKAGTSSLTECVLNKATNVAHWTTPSLKCIR
DPALVHQRPAPPS
Fc-GSLSGRSANPGS-IL-15-(GGS)3-IL-15Rα (SEQ ID NO: 375)
>P1499_Fc-PS45-L15R
EPKSSDKTHTCPPCPAPELLGGPSVFLFPPKPKDTLMISRTPEVTCVVVDVSHEDPEVKFNWY
VDGVEVHNAKTKPREEQYNSTYRVVSVLTVLHQDWLNGKEYKCKVSNKALPAPIEKTISKAKGQPREPQVYTLPP
SREEMTKNQVSLTCLVKGFYPSDIAVEWESNGQPENNYKTTPPVLDSDGSFFLYSKLTVDKSRWQQGNVFSCSVM
HEALHNHYTQKSLSLSPGKGSLSGRSANPGSNWVNVISDLKKIEDLIQSMHIDATLYTESDVHPSCKVTAMKCFL
LELQVISLESGDASIHDTVENLIILANNSLSSNGNVTESGCKECEELEEKNIKEFLQSFVHIVQMFINTSGGSGG
SGGSGGSGGSITCPPPMSVEHADIWVKSYSLYSRERYICNSGFKRKAGTSSLTECVLNKATNVAHWTTPSLKCIR
DPALVHQRPAPPS
Fc-GSLSGRSANQGS-IL-15-(GGS)3-IL-15Rα (SEQ ID NO: 376)
>P1500_Fc-PS46-L15R
EPKSSDKTHTCPPCPAPELLGGPSVFLFPPKPKDTLMISRTPEVTCVVVDVSHEDPEVKFNWY
VDGVEVHNAKTKPREEQYNSTYRVVSVLTVLHQDWLNGKEYKCKVSNKALPAPIEKTISKAKGQPREPQVYTLPP
SREEMTKNQVSLTCLVKGFYPSDIAVEWESNGQPENNYKTTPPVLDSDGSFFLYSKLTVDKSRWQQGNVFSCSVM
HEALHNHYTQKSLSLSPGKGSLSGRSANQGSNWVNVISDLKKIEDLIQSMHIDATLYTESDVHPSCKVTAMKCFL
LELQVISLESGDASIHDTVENLIILANNSLSSNGNVTESGCKECEELEEKNIKEFLQSFVHIVQMFINTSGGSGG
SGGSGGSGGSITCPPPMSVEHADIWVKSYSLYSRERYICNSGFKRKAGTSSLTECVLNKATNVAHWTTPSLKCIR
DPALVHQRPAPPS
Fc-GSLSGRSANRGS-IL-15-(GGS)3-IL-15Rα (SEQ ID NO: 377)
>P1501_Fc-PS47-L15R
EPKSSDKTHTCPPCPAPELLGGPSVFLFPPKPKDTLMISRTPEVTCVVVDVSHEDPEVKFNWY
VDGVEVHNAKTKPREEQYNSTYRVVSVLTVLHQDWLNGKEYKCKVSNKALPAPIEKTISKAKGQPREPQVYTLPP
SREEMTKNQVSLTCLVKGFYPSDIAVEWESNGQPENNYKTTPPVLDSDGSFFLYSKLTVDKSRWQQGNVFSCSVM
HEALHNHYTQKSLSLSPGKGSLSGRSANRGSNWVNVISDLKKIEDLIQSMHIDATLYTESDVHPSCKVTAMKCFL
LELQVISLESGDASIHDTVENLIILANNSLSSNGNVTESGCKECEELEEKNIKEFLQSFVHIVQMFINTSGGSGG
SGGSGGSGGSITCPPPMSVEHADIWVKSYSLYSRERYICNSGFKRKAGTSSLTECVLNKATNVAHWTTPSLKCIR
DPALVHQRPAPPS
Fc-GSLSGRSANSGS-IL-15-(GGS)3-IL-15Rα (SEQ ID NO: 378)
>P1502_Fc-PS48-L15R
EPKSSDKTHTCPPCPAPELLGGPSVFLFPPKPKDTLMISRTPEVTCVVVDVSHEDPEVKFNWY
VDGVEVHNAKTKPREEQYNSTYRVVSVLTVLHQDWLNGKEYKCKVSNKALPAPIEKTISKAKGQPREPQVYTLPP
SREEMTKNQVSLTCLVKGFYPSDIAVEWESNGQPENNYKTTPPVLDSDGSFFLYSKLTVDKSRWQQGNVFSCSVM
HEALHNHYTQKSLSLSPGKGSLSGRSANSGSNWVNVISDLKKIEDLIQSMHIDATLYTESDVHPSCKVTAMKCFL
LELQVISLESGDASIHDTVENLIILANNSLSSNGNVTESGCKECEELEEKNIKEFLQSFVHIVQMFINTSGGSGG
SGGSGGSGGSITCPPPMSVEHADIWVKSYSLYSRERYICNSGFKRKAGTSSLTECVLNKATNVAHWTTPSLKCIR
DPALVHQRPAPPS
Fc-GSLSGRSANTGS-IL-15-(GGS)3-IL-15Rα (SEQ ID NO: 379)
>P1503_Fc-PS49-L15R
EPKSSDKTHTCPPCPAPELLGGPSVFLFPPKPKDTLMISRTPEVTCVVVDVSHEDPEVKFNWY
VDGVEVHNAKTKPREEQYNSTYRVVSVLTVLHQDWLNGKEYKCKVSNKALPAPIEKTISKAKGQPREPQVYTLPP
SREEMTKNQVSLTCLVKGFYPSDIAVEWESNGQPENNYKTTPPVLDSDGSFFLYSKLTVDKSRWQQGNVFSCSVM
HEALHNHYTQKSLSLSPGKGSLSGRSANTGSNWVNVISDLKKIEDLIQSMHIDATLYTESDVHPSCKVTAMKCFL
LELQVISLESGDASIHDTVENLIILANNSLSSNGNVTESGCKECEELEEKNIKEFLQSFVHIVQMFINTSGGSGG
SGGSGGSGGSITCPPPMSVEHADIWVKSYSLYSRERYICNSGFKRKAGTSSLTECVLNKATNVAHWTTPSLKCIR
DPALVHQRPAPPS
Fc-GSLSGRSANVGS-IL-15-(GGS)3-IL-15Rα (SEQ ID NO: 380)
>P1504_Fc-PS50-L15R
EPKSSDKTHTCPPCPAPELLGGPSVFLFPPKPKDTLMISRTPEVTCVVVDVSHEDPEVKFNWY
VDGVEVHNAKTKPREEQYNSTYRVVSVLTVLHQDWLNGKEYKCKVSNKALPAPIEKTISKAKGQPREPQVYTLPP
SREEMTKNQVSLTCLVKGFYPSDIAVEWESNGQPENNYKTTPPVLDSDGSFFLYSKLTVDKSRWQQGNVFSCSVM
HEALHNHYTQKSLSLSPGKGSLSGRSANVGSNWVNVISDLKKIEDLIQSMHIDATLYTESDVHPSCKVTAMKCFL
LELQVISLESGDASIHDTVENLIILANNSLSSNGNVTESGCKECEELEEKNIKEFLQSFVHIVQMFINTSGGSGG
SGGSGGSGGSITCPPPMSVEHADIWVKSYSLYSRERYICNSGFKRKAGTSSLTECVLNKATNVAHWTTPSLKCIR
DPALVHQRPAPPS
Fc-GSLSGRSANWGS-IL-15-(GGS)3-IL-15Rα (SEQ ID NO: 381)
>P1505_Fc-PS51-L15R
EPKSSDKTHTCPPCPAPELLGGPSVFLFPPKPKDTLMISRTPEVTCVVVDVSHEDPEVKFNWY
VDGVEVHNAKTKPREEQYNSTYRVVSVLTVLHQDWLNGKEYKCKVSNKALPAPIEKTISKAKGQPREPQVYTLPP
SREEMTKNQVSLTCLVKGFYPSDIAVEWESNGQPENNYKTTPPVLDSDGSFFLYSKLTVDKSRWQQGNVFSCSVM
HEALHNHYTQKSLSLSPGKGSLSGRSANWGSNWVNVISDLKKIEDLIQSMHIDATLYTESDVHPSCKVTAMKCFL
LELQVISLESGDASIHDTVENLIILANNSLSSNGNVTESGCKECEELEEKNIKEFLQSFVHIVQMFINTSGGSGG
SGGSGGSGGSITCPPPMSVEHADIWVKSYSLYSRERYICNSGFKRKAGTSSLTECVLNKATNVAHWTTPSLKCIR
DPALVHQRPAPPS
Fc-GSLSGRSANYGS-IL-15-(GGS)3-IL-15Rα (SEQ ID NO: 382)
>P1506_Fc-PS52-L15R
EPKSSDKTHTCPPCPAPELLGGPSVFLFPPKPKDTLMISRTPEVTCVVVDVSHEDPEVKFNWY
VDGVEVHNAKTKPREEQYNSTYRVVSVLTVLHQDWLNGKEYKCKVSNKALPAPIEKTISKAKGQPREPQVYTLPP
SREEMTKNQVSLTCLVKGFYPSDIAVEWESNGQPENNYKTTPPVLDSDGSFFLYSKLTVDKSRWQQGNVFSCSVM
HEALHNHYTQKSLSLSPGKGSLSGRSANYGSNWVNVISDLKKIEDLIQSMHIDATLYTESDVHPSCKVTAMKCFL
LELQVISLESGDASIHDTVENLIILANNSLSSNGNVTESGCKECEELEEKNIKEFLQSFVHIVQMFINTSGGSGG
SGGSGGSGGSITCPPPMSVEHADIWVKSYSLYSRERYICNSGFKRKAGTSSLTECVLNKATNVAHWTTPSLKCIR
DPALVHQRPAPPS
Fc-b-GPLGLAGRSDNHSG-IL-15(S162A)-(GGS)3-IL-15Rα (SEQ ID NO: 383)
>P1511_Fc-b-PS12b-L15R-S162A
EPKSSDKTHTCPPCPAPEAAGGPSVFLFPPKPKDTLYITREPEVTCVVVDVSHEDPEVKFNWY
VDGVEVHNAKTKPREEQYNSTYRVVSVLTVLHQDWLNGKEYKCKVSNKALAAPIEKTISKAKGQPREPQVYTLPP
SREEMTKNQVSLTCLVKGFYPSDIAVEWESNGQPENNYKTTPPVLDSDGSFFLYSKLTVDKSRWQQGNVFSCSVM
HEALHNHYTQKSLSLSPGKGPLGLAGRSDNHSGNWVNVISDLKKIEDLIQSMHIDATLYTESDVHPSCKVTAMKC
FLLELQVISLESGDASIHDTVENLIILANNSLSSNGNVTESGCKECEELEEKNIKEFLQSFVHIVQMFINTAGGS
GGSGGSGGSGGSITCPPPMSVEHADIWVKSYSLYSRERYICNSGFKRKAGTSSLTECVLNKATNVAHWTTPSLKC
IRDPALVHQRPAPPS
Fc-PLGLAGSGRSDNR-IL-15(S162A)-(GGS)3-IL-15Rα (SEQ ID NO: 384)
>P1540_Fc-PS53-L15R
EPKSSDKTHTCPPCPAPELLGGPSVFLFPPKPKDTLMISRTPEVTCVVVDVSHEDPEVKFNWY
VDGVEVHNAKTKPREEQYNSTYRVVSVLTVLHQDWLNGKEYKCKVSNKALPAPIEKTISKAKGQPREPQVYTLPP
SREEMTKNQVSLTCLVKGFYPSDIAVEWESNGQPENNYKTTPPVLDSDGSFFLYSKLTVDKSRWQQGNVFSCSVM
HEALHNHYTQKSLSLSPGKPLGLAGSGRSDNRNWVNVISDLKKIEDLIQSMHIDATLYTESDVHPSCKVTAMKCF
LLELQVISLESGDASIHDTVENLIILANNSLSSNGNVTESGCKECEELEEKNIKEFLQSFVHIVQMFINTAGGSG
GSGGSGGSGGSITCPPPMSVEHADIWVKSYSLYSRERYICNSGFKRKAGTSSLTECVLNKATNVAHWTTPSLKCI
RDPALVHQRPAPPS
Fc-PLGLAGSGRSDNRGS-IL-15(S162A)-(GGS)3-IL-15Rα (SEQ ID NO: 385)
>P1541_Fc-PS54-L15R
EPKSSDKTHTCPPCPAPELLGGPSVFLFPPKPKDTLMISRTPEVTCVVVDVSHEDPEVKFNWY
VDGVEVHNAKTKPREEQYNSTYRVVSVLTVLHQDWLNGKEYKCKVSNKALPAPIEKTISKAKGQPREPQVYTLPP
SREEMTKNQVSLTCLVKGFYPSDIAVEWESNGQPENNYKTTPPVLDSDGSFFLYSKLTVDKSRWQQGNVFSCSVM
HEALHNHYTQKSLSLSPGKPLGLAGSGRSDNRGSNWVNVISDLKKIEDLIQSMHIDATLYTESDVHPSCKVTAMK
CFLLELQVISLESGDASIHDTVENLIILANNSLSSNGNVTESGCKECEELEEKNIKEFLQSFVHIVQMFINTAGG
SGGSGGSGGSGGSITCPPPMSVEHADIWVKSYSLYSRERYICNSGFKRKAGTSSLTECVLNKATNVAHWTTPSLK
CIRDPALVHQRPAPPS
Fc-GGGSKTHTGGGS-IL-15(S162A)-GSPLGLAGSGRSDNRGS-IL-15Rα (SEQ ID
NO: 386)
>P1542_Fc-StableS-L-PS55-R
EPKSSDKTHTCPPCPAPELLGGPSVFLFPPKPKDTLMISRTPEVTCVVVDVSHEDPEVKFNWY
VDGVEVHNAKTKPREEQYNSTYRVVSVLTVLHQDWLNGKEYKCKVSNKALPAPIEKTISKAKGQPREPQVYTLPP
SREEMTKNQVSLTCLVKGFYPSDIAVEWESNGQPENNYKTTPPVLDSDGSFFLYSKLTVDKSRWQQGNVFSCSVM
HEALHNHYTQKSLSLSPGKGGGSKTHTGGGSNWVNVISDLKKIEDLIQSMHIDATLYTESDVHPSCKVTAMKCFL
LELQVISLESGDASIHDTVENLIILANNSLSSNGNVTESGCKECEELEEKNIKEFLQSFVHIVQMFINTAGSPLG
LAGSGRSDNRGSITCPPPMSVEHADIWVKSYSLYSRERYICNSGFKRKAGTSSLTECVLNKATNVAHWTTPSLKC
IRDPALVHQRPAPPS
Fc-delK-GGGSKTHTGGGS-IL-15(S162A)-GSPLGLAGSGRSDNRGS-IL-15Rα
(SEQ ID NO: 387)
>P1636_(Fc)SPG-stable linker-L-PS55-R
EPKSSDKTHTCPPCPAPELLGGPSVFLFPPKPKDTLMISRTPEVTCVVVDVSHEDPEVKFNWY
VDGVEVHNAKTKPREEQYNSTYRVVSVLTVLHQDWLNGKEYKCKVSNKALPAPIEKTISKAKGQPREPQVYTLPP
SREEMTKNQVSLTCLVKGFYPSDIAVEWESNGQPENNYKTTPPVLDSDGSFFLYSKLTVDKSRWQQGNVFSCSVM
HEALHNHYTQKSLSLSPGGGGSKTHTGGGSNWVNVISDLKKIEDLIQSMHIDATLYTESDVHPSCKVTAMKCELL
ELQVISLESGDASIHDTVENLIILANNSLSSNGNVTESGCKECEELEEKNIKEFLQSFVHIVQMFINTAGSPLGL
AGSGRSDNRGSITCPPPMSVEHADIWVKSYSLYSRERYICNSGFKRKAGTSSLTECVLNKATNVAHWTTPSLKCI
RDPALVHQRPAPPS
Fc-GGGSAPTSSGSLSGRSDNHGS-IL-15-(GGS)3-IL-15Rα (SEQ ID NO: 388)
>P1637_(Fc)SPGK-GGGSAPTSS-GSLSGRSDNHGS-L15R
EPKSSDKTHTCPPCPAPELLGGPSVFLFPPKPKDTLMISRTPEVTCVVVDVSHEDPEVKFNWY
VDGVEVHNAKTKPREEQYNSTYRVVSVLTVLHQDWLNGKEYKCKVSNKALPAPIEKTISKAKGQPREPQVYTLPP
SREEMTKNQVSLTCLVKGFYPSDIAVEWESNGQPENNYKTTPPVLDSDGSFFLYSKLTVDKSRWQQGNVFSCSVM
HEALHNHYTQKSLSLSPGKGGGSAPTSSGSLSGRSDNHGSNWVNVISDLKKIEDLIQSMHIDATLYTESDVHPSC
KVTAMKCFLLELQVISLESGDASIHDTVENLIILANNSLSSNGNVTESGCKECEELEEKNIKEFLQSFVHIVQMF
INTSGGSGGSGGSGGSGGSITCPPPMSVEHADIWVKSYSLYSRERYICNSGFKRKAGTSSLTECVLNKATNVAHW
TTPSLKCIRDPALVHQRPAPPS
Fc-GSLSGRSDNRGS-IL-15-(GGS)3-IL-15Rα (SEQ ID NO: 389)
>P1638_(Fc)SPGK-GSLSGRSDNRGS-L15R
EPKSSDKTHTCPPCPAPELLGGPSVFLFPPKPKDTLMISRTPEVTCVVVDVSHEDPEVKFNWY
VDGVEVHNAKTKPREEQYNSTYRVVSVLTVLHQDWLNGKEYKCKVSNKALPAPIEKTISKAKGQPREPQVYTLPP
SREEMTKNQVSLTCLVKGFYPSDIAVEWESNGQPENNYKTTPPVLDSDGSFFLYSKLTVDKSRWQQGNVFSCSVM
HEALHNHYTQKSLSLSPGKGSLSGRSDNRGSNWVNVISDLKKIEDLIQSMHIDATLYTESDVHPSCKVTAMKCFL
LELQVISLESGDASIHDTVENLIILANNSLSSNGNVTESGCKECEELEEKNIKEFLQSFVHIVQMFINTSGGSGG
SGGSGGSGGSITCPPPMSVEHADIWVKSYSLYSRERYICNSGFKRKAGTSSLTECVLNKATNVAHWTTPSLKCIR
DPALVHQRPAPPS
Fc-delK-GSLSGRSDNHGS-IL-15-(GGS)3-IL-15Rα (SEQ ID NO: 390)
>P1639_(Fc)SPG-GSLSGRSDNHGS-L15R
EPKSSDKTHTCPPCPAPELLGGPSVFLFPPKPKDTLMISRTPEVTCVVVDVSHEDPEVKFNWY
VDGVEVHNAKTKPREEQYNSTYRVVSVLTVLHQDWLNGKEYKCKVSNKALPAPIEKTISKAKGQPREPQVYTLPP
SREEMTKNQVSLTCLVKGFYPSDIAVEWESNGQPENNYKTTPPVLDSDGSFFLYSKLTVDKSRWQQGNVFSCSVM
HEALHNHYTQKSLSLSPGGSLSGRSDNHGSNWVNVISDLKKIEDLIQSMHIDATLYTESDVHPSCKVTAMKCELL
ELQVISLESGDASIHDTVENLIILANNSLSSNGNVTESGCKECEELEEKNIKEFLQSFVHIVQMFINTSGGSGGS
GGSGGSGGSITCPPPMSVEHADIWVKSYSLYSRERYICNSGFKRKAGTSSLTECVLNKATNVAHWTTPSLKCIRD
PALVHQRPAPPS
Fc-delK-PLGLAGSGRSDNRGA-IL-15(D8N, S162A)-(GGS)3-IL-15Rα (SEQ
ID NO: 391)
>P1652_Fc_delK_PS103_L15R(IL15-D8N-S162A)
EPKSSDKTHTCPPCPAPELLGGPSVFLFPPKPKDTLMISRTPEVTCVVVDVSHEDPEVKFNWY
VDGVEVHNAKTKPREEQYNSTYRVVSVLTVLHQDWLNGKEYKCKVSNKALPAPIEKTISKAKGQPREPQVYTLPP
SREEMTKNQVSLTCLVKGFYPSDIAVEWESNGQPENNYKTTPPVLDSDGSFFLYSKLTVDKSRWQQGNVFSCSVM
HEALHNHYTQKSLSLSPGPLGLAGSGRSDNRGANWVNVISNLKKIEDLIQSMHIDATLYTESDVHPSCKVTAMKC
FLLELQVISLESGDASIHDTVENLIILANNSLSSNGNVTESGCKECEELEEKNIKEFLQSFVHIVQMFINTAGGS
GGSGGSGGSGGSITCPPPMSVEHADIWVKSYSLYSRERYICNSGFKRKAGTSSLTECVLNKATNVAHWTTPSLKC
IRDPALVHQRPAPPS
Fc-delK-PLGLAGSGRSDNRGA-IL-15(E64Q, S162A)-(GGS)3-IL-15Rα (SEQ
ID NO: 392)
>P1653_Fc_delK_PS103_L15R(IL15-E64Q-S162A)
EPKSSDKTHTCPPCPAPELLGGPSVFLFPPKPKDTLMISRTPEVTCVVVDVSHEDPEVKFNWY
VDGVEVHNAKTKPREEQYNSTYRVVSVLTVLHQDWLNGKEYKCKVSNKALPAPIEKTISKAKGQPREPQVYTLPP
SREEMTKNQVSLTCLVKGFYPSDIAVEWESNGQPENNYKTTPPVLDSDGSFFLYSKLTVDKSRWQQGNVFSCSVM
HEALHNHYTQKSLSLSPGPLGLAGSGRSDNRGANWVNVISDLKKIEDLIQSMHIDATLYTESDVHPSCKVTAMKC
FLLELQVISLESGDASIHDTVQNLIILANNSLSSNGNVTESGCKECEELEEKNIKEFLQSFVHIVQMFINTAGGS
GGSGGSGGSGGSITCPPPMSVEHADIWVKSYSLYSRERYICNSGFKRKAGTSSLTECVLNKATNVAHWTTPSLKC
IRDPALVHQRPAPPS
Fc-delK-PLGLAGSGRSDNRGA-IL-15(E64K, S162A)-(GGS)3-IL-15Rα (SEQ
ID NO: 393)
>P1654_Fc_delK_PS103_L15R(IL15-E64K-S162A)
EPKSSDKTHTCPPCPAPELLGGPSVFLFPPKPKDTLMISRTPEVTCVVVDVSHEDPEVKFNWY
VDGVEVHNAKTKPREEQYNSTYRVVSVLTVLHQDWLNGKEYKCKVSNKALPAPIEKTISKAKGQPREPQVYTLPP
SREEMTKNQVSLTCLVKGFYPSDIAVEWESNGQPENNYKTTPPVLDSDGSFFLYSKLTVDKSRWQQGNVFSCSVM
HEALHNHYTQKSLSLSPGPLGLAGSGRSDNRGANWVNVISDLKKIEDLIQSMHIDATLYTESDVHPSCKVTAMKC
FLLELQVISLESGDASIHDTVKNLIILANNSLSSNGNVTESGCKECEELEEKNIKEFLQSFVHIVQMFINTAGGS
GGSGGSGGSGGSITCPPPMSVEHADIWVKSYSLYSRERYICNSGFKRKAGTSSLTECVLNKATNVAHWTTPSLKC
IRDPALVHQRPAPPS
Fc-delK-PLGLAGSGRSDNRGA-IL-15(N65A, S162A)-(GGS)3-IL-15Rα (SEQ
ID NO: 394)
>P1655_Fc_delK_PS103_L15R(IL15-N65A-S162A)
EPKSSDKTHTCPPCPAPELLGGPSVFLFPPKPKDTLMISRTPEVTCVVVDVSHEDPEVKFNWY
VDGVEVHNAKTKPREEQYNSTYRVVSVLTVLHQDWLNGKEYKCKVSNKALPAPIEKTISKAKGQPREPQVYTLPP
SREEMTKNQVSLTCLVKGFYPSDIAVEWESNGQPENNYKTTPPVLDSDGSFFLYSKLTVDKSRWQQGNVFSCSVM
HEALHNHYTQKSLSLSPGPLGLAGSGRSDNRGANWVNVISDLKKIEDLIQSMHIDATLYTESDVHPSCKVTAMKC
FLLELQVISLESGDASIHDTVEALIILANNSLSSNGNVTESGCKECEELEEKNIKEFLQSFVHIVQMFINTAGGS
GGSGGSGGSGGSITCPPPMSVEHADIWVKSYSLYSRERYICNSGFKRKAGTSSLTECVLNKATNVAHWTTPSLKC
IRDPALVHQRPAPPS
Fc-delK-PLGLAGSGRSDNRGA-IL-15(N65D, S162A)-(GGS)3-IL-15Rα (SEQ
ID NO: 395)
>P1656_Fc_delK_PS103_L15R(IL15-N65D-S162A)
EPKSSDKTHTCPPCPAPELLGGPSVFLFPPKPKDTLMISRTPEVTCVVVDVSHEDPEVKFNWY
VDGVEVHNAKTKPREEQYNSTYRVVSVLTVLHQDWLNGKEYKCKVSNKALPAPIEKTISKAKGQPREPQVYTLPP
SREEMTKNQVSLTCLVKGFYPSDIAVEWESNGQPENNYKTTPPVLDSDGSFFLYSKLTVDKSRWQQGNVFSCSVM
HEALHNHYTQKSLSLSPGPLGLAGSGRSDNRGANWVNVISDLKKIEDLIQSMHIDATLYTESDVHPSCKVTAMKC
FLLELQVISLESGDASIHDTVEDLIILANNSLSSNGNVTESGCKECEELEEKNIKEFLQSFVHIVQMFINTAGGS
GGSGGSGGSGGSITCPPPMSVEHADIWVKSYSLYSRERYICNSGFKRKAGTSSLTECVLNKATNVAHWTTPSLKC
IRDPALVHQRPAPPS
Fc-delK-PLGLAGSGRSDNRGA-IL-15(I68D, S162A)-(GGS)3-IL-15Rα (SEQ
ID NO: 396)
>P1657_Fc_delK_PS103_L15R(IL15-168D-S162A)
EPKSSDKTHTCPPCPAPELLGGPSVFLFPPKPKDTLMISRTPEVTCVVVDVSHEDPEVKFNWY
VDGVEVHNAKTKPREEQYNSTYRVVSVLTVLHQDWLNGKEYKCKVSNKALPAPIEKTISKAKGQPREPQVYTLPP
SREEMTKNQVSLTCLVKGFYPSDIAVEWESNGQPENNYKTTPPVLDSDGSFFLYSKLTVDKSRWQQGNVFSCSVM
HEALHNHYTQKSLSLSPGPLGLAGSGRSDNRGANWVNVISDLKKIEDLIQSMHIDATLYTESDVHPSCKVTAMKC
FLLELQVISLESGDASIHDTVENLIDLANNSLSSNGNVTESGCKECEELEEKNIKEFLQSFVHIVQMFINTAGGS
GGSGGSGGSGGSITCPPPMSVEHADIWVKSYSLYSRERYICNSGFKRKAGTSSLTECVLNKATNVAHWTTPSLKC
IRDPALVHQRPAPPS
Fc-delK-PLGLAGSGRSDNQGA-IL-15(S162A)-(GGS)3-IL-15Rα (SEQ ID
NO: 397)
>P1658_Fc_delK_PS104_L15R(IL15-S162A)
EPKSSDKTHTCPPCPAPELLGGPSVFLEPPKPKDTLMISRTPEVTCVVVDVSHEDPEVKFNWY
VDGVEVHNAKTKPREEQYNSTYRVVSVLTVLHQDWLNGKEYKCKVSNKALPAPIEKTISKAKGQPREPQVYTLPP
SREEMTKNQVSLTCLVKGFYPSDIAVEWESNGQPENNYKTTPPVLDSDGSFELYSKLTVDKSRWQQGNVESCSVM
HEALHNHYTQKSLSLSPGPLGLAGSGRSDNQGANWVNVISDLKKIEDLIQSMHIDATLYTESDVHPSCKVTAMKC
FLLELQVISLESGDASIHDTVENLIILANNSLSSNGNVTESGCKECEELEEKNIKEFLQSFVHIVQMFINTAGGS
GGSGGSGGSGGSITCPPPMSVEHADIWVKSYSLYSRERYICNSGFKRKAGTSSLTECVLNKATNVAHWTTPSLKC
IRDPALVHQRPAPPS
Fc-delK-PLGLAGSGRSDNYGA-IL-15(S162A)-(GGS)3-IL-15Rα (SEQ ID
NO: 398)
>P1659_Fc_delK_PS105_L15R(IL15-S162A)
EPKSSDKTHTCPPCPAPELLGGPSVFLEPPKPKDTLMISRTPEVTCVVVDVSHEDPEVKFNWY
VDGVEVHNAKTKPREEQYNSTYRVVSVLTVLHQDWLNGKEYKCKVSNKALPAPIEKTISKAKGQPREPQVYTLPP
SREEMTKNQVSLTCLVKGFYPSDIAVEWESNGQPENNYKTTPPVLDSDGSFELYSKLTVDKSRWQQGNVESCSVM
HEALHNHYTQKSLSLSPGPLGLAGSGRSDNYGANWVNVISDLKKIEDLIQSMHIDATLYTESDVHPSCKVTAMKC
FLLELQVISLESGDASIHDTVENLIILANNSLSSNGNVTESGCKECEELEEKNIKEFLQSFVHIVQMFINTAGGS
GGSGGSGGSGGSITCPPPMSVEHADIWVKSYSLYSRERYICNSGFKRKAGTSSLTECVLNKATNVAHWTTPSLKC
IRDPALVHQRPAPPS
Fc-delK-PLGLAGSGRSDNYGA-IL-15(S162A)-(GGS)3-IL-15Rα (IL-15opt1,
IL-15Ropt) (SEQ ID NO: 399)
>P1660_1659a_Fc_delK-P5105-L15R (IL-15-S162A, IL-15opt1, IL-15Ropt)
EPKSSDKTHTCPPCPAPELLGGPSVFLEPPKPKDTLMISRTPEVTCVVVDVSHEDPEVKFNWY
VDGVEVHNAKTKPREEQYNSTYRVVSVLTVLHQDWLNGKEYKCKVSNKALPAPIEKTISKAKGQPREPQVYTLPP
SREEMTKNQVSLTCLVKGFYPSDIAVEWESNGQPENNYKTTPPVLDSDGSFELYSKLTVDKSRWQQGNVESCSVM
HEALHNHYTQKSLSLSPGPLGLAGSGRSDNYGANWVNVISDLKKIEDLIQSMHIDATLYTESDVHPSCKVTAMKC
FLLELQVISLESGDASIHDTVENLIILANNSLSSNGNVTESGCKECEELEEKNIKEFLQSFVHIVQMFINTAGGS
GGSGGSGGSGGSITCPPPMSVEHADIWVKSYSLYSRERYICNSGFKRKAGTSSLTECVLNKATNVAHWTTPSLKC
IRDPALVHQRPAPPS
GAGCCCAAATCTTCTGACAAAACTCACACATGCCCACCGTGCCCAGCACCTGAACTCCTGGGG
GGACCGTCAGTCTTCCTCTTCCCCCCAAAACCCAAGGACACCCTCATGATCTCCCGGACCCCTGAGGTCACATGC
GTGGTGGTGGACGTGAGCCACGAAGACCCTGAGGTCAAGTTCAACTGGTACGTGGACGGCGTGGAGGTGCATAAT
GCCAAGACAAAGCCGCGGGAGGAGCAGTACAACAGCACGTACCGTGTGGTCAGCGTCCTCACCGTCCTGCACCAG
GACTGGCTGAATGGCAAGGAGTACAAGTGCAAGGTCTCCAACAAAGCCCTCCCAGCCCCCATCGAGAAAACCATC
TCCAAAGCCAAAGGGCAGCCCCGAGAACCACAGGTGTACACCCTGCCCCCATCACGGGAGGAGATGACCAAGAAC
CAGGTCAGCCTGACCTGCCTGGTCAAAGGCTTCTATCCCAGCGACATCGCCGTGGAGTGGGAGAGCAATGGGCAG
CCGGAGAACAACTACAAGACCACGCCTCCCGTGCTGGACTCCGACGGCTCCTTCTTCCTCTATAGCAAGCTCACC
GTGGACAAGAGCAGGTGGCAGCAGGGGAACGTCTTCTCATGCTCCGTGATGCATGAGGCTCTGCACAACCACTAC
ACGCAGAAGAGCCTCTCCCTGTCCCCGGGTCCATTGGGACTGGCTGGGAGCGGTAGATCCGACAATTACGGAGCC
AACTGGGTGAACGTGATCTCGGACCTGAAGAAGATCGAGGACCTCATCCAGTCGATGCACATCGACGCGACGCTG
TACACGGAGTCGGACGTCCACCCGTCGTGCAAGGTCACGGCGATGAAGTGCTTCCTCCTGGAGCTCCAAGTCATC
TCGCTCGAGTCGGGGGACGCGTCGATCCACGACACGGTGGAGAACCTGATCATCCTGGCGAACAACTCGCTGTCG
TCGAACGGGAACGTCACGGAGTCGGGCTGCAAGGAGTGCGAGGAGCTGGAGGAGAAGAACATCAAGGAGTTCCTG
CAGTCGTTCGTGCACATCGTCCAGATGTTCATCAACACGGCCGGTGGCTCCGGCGGAAGCGGAGGTTCCGGCGGT
AGCGGTGGATCCATCACGTGCCCGCCCCCCATGTCCGTGGAGCACGCAGACATCTGGGTCAAGAGCTACAGCTTG
TACTCCCGGGAGCGGTACATCTGCAACTCGGGTTTCAAGCGGAAGGCCGGCACGTCCAGCCTGACGGAGTGCGTG
TTGAACAAGGCCACGAATGTCGCCCACTGGACGACCCCCTCGCTCAAGTGCATCCGCGACCCGGCCCTGGTTCAC
CAGCGGCCCGCGCCACCCTCC (SEQ ID NO: 400)
Fc-delK-PLGLAGSGRSDNYGA-IL-15(S162A)-(GGS)3-IL-15Rα (IL-150pt2,
IL-15Ropt) (SEQ ID NO: 401)
>P1661_1659b_Fc_delK-PS105-L15R (IL-15-S162A, IL-15opt2, IL-15Ropt)
EPKSSDKTHTCPPCPAPELLGGPSVFLFPPKPKDTLMISRTPEVTCVVVDVSHEDPEVKFNWY
VDGVEVHNAKTKPREEQYNSTYRVVSVLTVLHQDWLNGKEYKCKVSNKALPAPIEKTISKAKGQPREPQVYTLPP
SREEMTKNQVSLTCLVKGFYPSDIAVEWESNGQPENNYKTTPPVLDSDGSFFLYSKLTVDKSRWQQGNVFSCSVM
HEALHNHYTQKSLSLSPGPLGLAGSGRSDNYGANWVNVISDLKKIEDLIQSMHIDATLYTESDVHPSCKVTAMKC
FLLELQVISLESGDASIHDTVENLIILANNSLSSNGNVTESGCKECEELEEKNIKEFLQSFVHIVQMFINTAGGS
GGSGGSGGSGGSITCPPPMSVEHADIWVKSYSLYSRERYICNSGFKRKAGTSSLTECVLNKATNVAHWTTPSLKC
IRDPALVHQRPAPPS
GAGCCCAAATCTTCTGACAAAACTCACACATGCCCACCGTGCCCAGCACCTGAACTCCTGGGG
GGACCGTCAGTCTTCCTCTTCCCCCCAAAACCCAAGGACACCCTCATGATCTCCCGGACCCCTGAGGTCACATGC
GTGGTGGTGGACGTGAGCCACGAAGACCCTGAGGTCAAGTTCAACTGGTACGTGGACGGCGTGGAGGTGCATAAT
GCCAAGACAAAGCCGCGGGAGGAGCAGTACAACAGCACGTACCGTGTGGTCAGCGTCCTCACCGTCCTGCACCAG
GACTGGCTGAATGGCAAGGAGTACAAGTGCAAGGTCTCCAACAAAGCCCTCCCAGCCCCCATCGAGAAAACCATC
TCCAAAGCCAAAGGGCAGCCCCGAGAACCACAGGTGTACACCCTGCCCCCATCACGGGAGGAGATGACCAAGAAC
CAGGTCAGCCTGACCTGCCTGGTCAAAGGCTTCTATCCCAGCGACATCGCCGTGGAGTGGGAGAGCAATGGGCAG
CCGGAGAACAACTACAAGACCACGCCTCCCGTGCTGGACTCCGACGGCTCCTTCTTCCTCTATAGCAAGCTCACC
GTGGACAAGAGCAGGTGGCAGCAGGGGAACGTCTTCTCATGCTCCGTGATGCATGAGGCTCTGCACAACCACTAC
ACGCAGAAGAGCCTCTCCCTGTCCCCGGGTCCATTGGGACTGGCTGGGAGCGGTAGATCCGACAATTACGGAGCC
AATTGGGTGAACGTGATCAGCGACCTGAAGAAGATCGAGGACCTCATCCAGAGCATGCACATCGACGCCACCCTG
TACACCGAGAGCGATGTGCACCCCAGCTGTAAGGTGACCGCCATGAAGTGCTTTCTGCTGGAGCTGCAAGTGATC
AGCCTGGAGAGCGGCGACGCCAGCATCCACGACACCGTGGAGAACCTGATCATCCTGGCCAACAACAGCCTGAGC
AGCAACGGCAATGTGACCGAGAGCGGCTGTAAGGAGTGTGAGGAGCTGGAGGAGAAGAACATCAAGGAGTTTCTG
CAGAGCTTCGTGCACATCGTGCAGATGTTCATCAACACCGCCGGTGGCTCCGGCGGAAGCGGAGGTTCCGGCGGT
AGCGGTGGATCCATCACGTGCCCGCCCCCCATGTCCGTGGAGCACGCAGACATCTGGGTCAAGAGCTACAGCTTG
TACTCCCGGGAGCGGTACATCTGCAACTCGGGTTTCAAGCGGAAGGCCGGCACGTCCAGCCTGACGGAGTGCGTG
TTGAACAAGGCCACGAATGTCGCCCACTGGACGACCCCCTCGCTCAAGTGCATCCGCGACCCGGCCCTGGTTCAC
CAGCGGCCCGCGCCACCCTCC (SEQ ID NO: 402)
Fc-delK-PLGLAGSGRSDNYGA-IL-15(S162A)-(GGS)3-IL-15Rα (IL-15co,
IL-15aco) (SEQ ID NO: 403)
>P1663_1659c_Fc_delK-PS105-L15R (IL-15-S162A, IL15co, IL15Raco)
EPKSSDKTHTCPPCPAPELLGGPSVFLFPPKPKDTLMISRTPEVTCVVVDVSHEDPEVKFNWY
VDGVEVHNAKTKPREEQYNSTYRVVSVLTVLHQDWLNGKEYKCKVSNKALPAPIEKTISKAKGQPREPQVYTLPP
SREEMTKNQVSLTCLVKGFYPSDIAVEWESNGQPENNYKTTPPVLDSDGSFFLYSKLTVDKSRWQQGNVFSCSVM
HEALHNHYTQKSLSLSPGPLGLAGSGRSDNYGANWVNVISDLKKIEDLIQSMHIDATLYTESDVHPSCKVTAMKC
FLLELQVISLESGDASIHDTVENLIILANNSLSSNGNVTESGCKECEELEEKNIKEFLQSFVHIVQMFINTAGGS
GGSGGSGGSGGSITCPPPMSVEHADIWVKSYSLYSRERYICNSGFKRKAGTSSLTECVLNKATNVAHWTTPSLKC
IRDPALVHQRPAPPS
GAGCCCAAATCTTCTGACAAAACTCACACATGCCCACCGTGCCCAGCACCTGAACTCCTGGGG
GGACCGTCAGTCTTCCTCTTCCCCCCAAAACCCAAGGACACCCTCATGATCTCCCGGACCCCTGAGGTCACATGC
GTGGTGGTGGACGTGAGCCACGAAGACCCTGAGGTCAAGTTCAACTGGTACGTGGACGGCGTGGAGGTGCATAAT
GCCAAGACAAAGCCGCGGGAGGAGCAGTACAACAGCACGTACCGTGTGGTCAGCGTCCTCACCGTCCTGCACCAG
GACTGGCTGAATGGCAAGGAGTACAAGTGCAAGGTCTCCAACAAAGCCCTCCCAGCCCCCATCGAGAAAACCATC
TCCAAAGCCAAAGGGCAGCCCCGAGAACCACAGGTGTACACCCTGCCCCCATCACGGGAGGAGATGACCAAGAAC
CAGGTCAGCCTGACCTGCCTGGTCAAAGGCTTCTATCCCAGCGACATCGCCGTGGAGTGGGAGAGCAATGGGCAG
CCGGAGAACAACTACAAGACCACGCCTCCCGTGCTGGACTCCGACGGCTCCTTCTTCCTCTATAGCAAGCTCACC
GTGGACAAGAGCAGGTGGCAGCAGGGGAACGTCTTCTCATGCTCCGTGATGCATGAGGCTCTGCACAACCACTAC
ACGCAGAAGAGCCTCTCCCTGTCCCCGGGTCCATTGGGACTGGCTGGGAGCGGTAGATCCGACAATTACGGAGCC
AACTGGGTGAACGTGATCAGCGACCTGAAGAAGATCGAGGACCTGATCCAGAGCATGCACATCGACGCCACCCTG
TACACCGAGAGCGACGTGCACCCCAGCTGCAAGGTGACCGCCATGAAGTGCTTCCTGCTGGAGCTGCAGGTGATC
AGCCTGGAGAGCGGCGACGCCAGCATCCACGACACCGTGGAGAACCTGATCATCCTGGCCAACAACAGCCTGAGC
AGCAACGGCAACGTGACCGAGAGCGGCTGCAAGGAGTGCGAGGAGCTGGAGGAGAAGAACATCAAGGAGTTCCTG
CAGAGCTTCGTGCACATCGTGCAGATGTTCATCAACACCGCCGGTGGCTCCGGCGGAAGCGGAGGTTCCGGCGGT
AGCGGTGGATCCATCACCTGCCCTCCTCCAATGAGCGTGGAGCACGCCGACATCTGGGTGAAGAGCTACAGCCTG
TACAGCCGGGAGCGGTACATCTGCAACAGCGGCTTCAAGCGGAAGGCTGGCACCAGCAGCCTGACCGAGTGCGTG
CTGAACAAGGCCACCAACGTGGCCCACTGGACCACCCCCAGCCTGAAGTGCATCCGGGACCCTGCCCTGGTGCAT
CAACGGCCTGCTCCTCCTAGC (SEQ ID NO: 404)
Fc-delK-PLGLAGSGRSDNYGA-IL-15(S162A)-(GGS)3-IL-15Rα-sushi(T2A)
(SEQ ID NO: 405)
>P1682_Fc_delK-PS105-L15Rsushi (IL15_S162A-IL15Rsushi_T2A)
EPKSSDKTHTCPPCPAPELLGGPSVFLFPPKPKDTLMISRTPEVTCVVVDVSHEDPEVKFNWY
VDGVEVHNAKTKPREEQYNSTYRVVSVLTVLHQDWLNGKEYKCKVSNKALPAPIEKTISKAKGQPREPQVYTLPP
SREEMTKNQVSLTCLVKGFYPSDIAVEWESNGQPENNYKTTPPVLDSDGSFFLYSKLTVDKSRWQQGNVFSCSVM
HEALHNHYTQKSLSLSPGPLGLAGSGRSDNYGANWVNVISDLKKIEDLIQSMHIDATLYTESDVHPSCKVTAMKC
FLLELQVISLESGDASIHDTVENLIILANNSLSSNGNVTESGCKECEELEEKNIKEFLQSFVHIVQMFINTAGGS
GGSGGSGGSGGSIACPPPMSVEHADIWVKSYSLYSRERYICNSGFKRKAGTSSLTECVLNKATNVAHWTTPSLKC
IR
Fc-delK-PLGLAGSGRSDNYGA-IL-15(L52C, S162A)-(GGS)3-IL-15Rα-
sushi(T2A, S40C) (SEQ ID NO: 406)
>P1683_Fc_delK-PS105-L15Rsushi (IL15_L52C_S162A-IL15Rsushi_T2A_S40C)
EPKSSDKTHTCPPCPAPELLGGPSVFLFPPKPKDTLMISRTPEVTCVVVDVSHEDPEVKFNWY
VDGVEVHNAKTKPREEQYNSTYRVVSVLTVLHQDWLNGKEYKCKVSNKALPAPIEKTISKAKGQPREPQVYTLPP
SREEMTKNQVSLTCLVKGFYPSDIAVEWESNGQPENNYKTTPPVLDSDGSFFLYSKLTVDKSRWQQGNVFSCSVM
HEALHNHYTQKSLSLSPGPLGLAGSGRSDNYGANWVNVISDLKKIEDLIQSMHIDATLYTESDVHPSCKVTAMKC
FLLELQVISCESGDASIHDTVENLIILANNSLSSNGNVTESGCKECEELEEKNIKEFLQSFVHIVQMFINTAGGS
GGSGGSGGSGGSIACPPPMSVEHADIWVKSYSLYSRERYICNSGFKRKAGTCSLTECVLNKATNVAHWTTPSLKC
IR
Fc-delK-GG-IL-15(S162A)-GPLGLAGSGRSDNQG-IL-15Rα(T2A) (SEQ ID
NO: 407)
>P1696_Fc_delK-GG-L_S162A-GPLGLAGSGRSDNQG-R_T2A (2/15Q)
EPKSSDKTHTCPPCPAPELLGGPSVFLFPPKPKDTLMISRTPEVTCVVVDVSHEDPEVKFNWY
VDGVEVHNAKTKPREEQYNSTYRVVSVLTVLHQDWLNGKEYKCKVSNKALPAPIEKTISKAKGQPREPQVYTLPP
SREEMTKNQVSLTCLVKGFYPSDIAVEWESNGQPENNYKTTPPVLDSDGSFFLYSKLTVDKSRWQQGNVFSCSVM
HEALHNHYTQKSLSLSPGGGNWVNVISDLKKIEDLIQSMHIDATLYTESDVHPSCKVTAMKCELLELQVISLESG
DASIHDTVENLIILANNSLSSNGNVTESGCKECEELEEKNIKEFLQSFVHIVQMFINTAGPLGLAGSGRSDNQGI
ACPPPMSVEHADIWVKSYSLYSRERYICNSGFKRKAGTSSLTECVLNKATNVAHWTTPSLKCIRDPALVHQRPAP
PS
Fc-delK-GG-IL-15(S162A)-GSPLGLAGSGRSDNQGA-IL-15Rα(T2A) (SEQ ID
NO: 408)
>P1697_Fc_delK-GG-L_S162A-GSPLGLAGSGRSDNQGA-R_T2A (2/17Q)
EPKSSDKTHTCPPCPAPELLGGPSVFLFPPKPKDTLMISRTPEVTCVVVDVSHEDPEVKFNWY
VDGVEVHNAKTKPREEQYNSTYRVVSVLTVLHQDWLNGKEYKCKVSNKALPAPIEKTISKAKGQPREPQVYTLPP
SREEMTKNQVSLTCLVKGFYPSDIAVEWESNGQPENNYKTTPPVLDSDGSFFLYSKLTVDKSRWQQGNVFSCSVM
HEALHNHYTQKSLSLSPGGGNWVNVISDLKKIEDLIQSMHIDATLYTESDVHPSCKVTAMKCELLELQVISLESG
DASIHDTVENLIILANNSLSSNGNVTESGCKECEELEEKNIKEFLQSFVHIVQMFINTAGSPLGLAGSGRSDNQG
AIACPPPMSVEHADIWVKSYSLYSRERYICNSGFKRKAGTSSLTECVLNKATNVAHWTTPSLKCIRDPALVHQRP
APPS
Fc-delK-GG-IL-15(S162A)-GGSPLGLAGSGRSDNQGGA-IL-15Rα(T2A) (SEQ
ID NO: 409)
>P1698_Fc_delK-GG-L_S162A-GGSPLGLAGSGRSDNQGGA-R_T2A (2/19Q)
EPKSSDKTHTCPPCPAPELLGGPSVFLFPPKPKDTLMISRTPEVTCVVVDVSHEDPEVKFNWY
VDGVEVHNAKTKPREEQYNSTYRVVSVLTVLHQDWLNGKEYKCKVSNKALPAPIEKTISKAKGQPREPQVYTLPP
SREEMTKNQVSLTCLVKGFYPSDIAVEWESNGQPENNYKTTPPVLDSDGSFFLYSKLTVDKSRWQQGNVFSCSVM
HEALHNHYTQKSLSLSPGGGNWVNVISDLKKIEDLIQSMHIDATLYTESDVHPSCKVTAMKCELLELQVISLESG
DASIHDTVENLIILANNSLSSNGNVTESGCKECEELEEKNIKEFLQSFVHIVQMFINTAGGSPLGLAGSGRSDNQ
GGAIACPPPMSVEHADIWVKSYSLYSRERYICNSGFKRKAGTSSLTECVLNKATNVAHWTTPSLKCIRDPALVHQ
RPAPPS
Fc-delK-GG-IL-15(S162A)-GGGSPLGLAGSGRSDNQGGGA-IL-15Rα(T2A) (SEQ
ID NO: 410)
>P1699_15LR-119_Fc_delK-GG-L_S162A-GGGSPLGLAGSGRSDNQGGGA-R_T2A
(2/21Q)
EPKSSDKTHTCPPCPAPELLGGPSVFLFPPKPKDTLMISRTPEVTCVVVDVSHEDPEVKFNWY
VDGVEVHNAKTKPREEQYNSTYRVVSVLTVLHQDWLNGKEYKCKVSNKALPAPIEKTISKAKGQPREPQVYTLPP
SREEMTKNQVSLTCLVKGFYPSDIAVEWESNGQPENNYKTTPPVLDSDGSFFLYSKLTVDKSRWQQGNVFSCSVM
HEALHNHYTQKSLSLSPGGGNWVNVISDLKKIEDLIQSMHIDATLYTESDVHPSCKVTAMKCELLELQVISLESG
DASIHDTVENLIILANNSLSSNGNVTESGCKECEELEEKNIKEFLQSFVHIVQMFINTAGGGSPLGLAGSGRSDN
QGGGAIACPPPMSVEHADIWVKSYSLYSRERYICNSGFKRKAGTSSLTECVLNKATNVAHWTTPSLKCIRDPALV
HQRPAPPS
Fc-delK-GG-IL-15(S162A)-GGSGSPLGLAGSGRSDNQGGGGA-IL-15Rα(T2A)
(SEQ ID NO: 411)
>P1700_Fc_delK-GG-L_S162A-GGSGSPLGLAGSGRSDNQGGGGA-R_T2A (2/23Q)
EPKSSDKTHTCPPCPAPELLGGPSVFLFPPKPKDTLMISRTPEVTCVVVDVSHEDPEVKFNWY
VDGVEVHNAKTKPREEQYNSTYRVVSVLTVLHQDWLNGKEYKCKVSNKALPAPIEKTISKAKGQPREPQVYTLPP
SREEMTKNQVSLTCLVKGFYPSDIAVEWESNGQPENNYKTTPPVLDSDGSFFLYSKLTVDKSRWQQGNVFSCSVM
HEALHNHYTQKSLSLSPGGGNWVNVISDLKKIEDLIQSMHIDATLYTESDVHPSCKVTAMKCELLELQVISLESG
DASIHDTVENLIILANNSLSSNGNVTESGCKECEELEEKNIKEFLQSFVHIVQMFINTAGGSGSPLGLAGSGRSD
NQGGGGAIACPPPMSVEHADIWVKSYSLYSRERYICNSGFKRKAGTSSLTECVLNKATNVAHWTTPSLKCIRDPA
LVHQRPAPPS
Fc-delK-GG-IL-15(S162A)-GGSGGSPLGLAGSGRSDNQGGSGGA-IL-15Rα(T2A)
(SEQ ID NO: 412)
>P1701_Fc_delK-GG-L_S162A-GGSGGSPLGLAGSGRSDNQGGSGGA-R_T2A (2/25Q)
EPKSSDKTHTCPPCPAPELLGGPSVFLFPPKPKDTLMISRTPEVTCVVVDVSHEDPEVKFNWY
VDGVEVHNAKTKPREEQYNSTYRVVSVLTVLHQDWLNGKEYKCKVSNKALPAPIEKTISKAKGQPREPQVYTLPP
SREEMTKNQVSLTCLVKGFYPSDIAVEWESNGQPENNYKTTPPVLDSDGSFFLYSKLTVDKSRWQQGNVFSCSVM
HEALHNHYTQKSLSLSPGGGNWVNVISDLKKIEDLIQSMHIDATLYTESDVHPSCKVTAMKCELLELQVISLESG
DASIHDTVENLIILANNSLSSNGNVTESGCKECEELEEKNIKEFLQSFVHIVQMFINTAGGSGGSPLGLAGSGRS
DNQGGSGGAIACPPPMSVEHADIWVKSYSLYSRERYICNSGFKRKAGTSSLTECVLNKATNVAHWTTPSLKCIRD
PALVHQRPAPPS
Fc-delK-GG-IL-15(S162A)-GPLGLAGSGRSDNRG-IL-15Rα(T2A) (SEQ ID
NO: 413)
>P1702_Fc_delK-GG-L_S162A-GPLGLAGSGRSDNRG-R_T2A (2/15R)
EPKSSDKTHTCPPCPAPELLGGPSVFLFPPKPKDTLMISRTPEVTCVVVDVSHEDPEVKFNWY
VDGVEVHNAKTKPREEQYNSTYRVVSVLTVLHQDWLNGKEYKCKVSNKALPAPIEKTISKAKGQPREPQVYTLPP
SREEMTKNQVSLTCLVKGFYPSDIAVEWESNGQPENNYKTTPPVLDSDGSFFLYSKLTVDKSRWQQGNVFSCSVM
HEALHNHYTQKSLSLSPGGGNWVNVISDLKKIEDLIQSMHIDATLYTESDVHPSCKVTAMKCELLELQVISLESG
DASIHDTVENLIILANNSLSSNGNVTESGCKECEELEEKNIKEFLQSFVHIVQMFINTAGPLGLAGSGRSDNRGI
ACPPPMSVEHADIWVKSYSLYSRERYICNSGFKRKAGTSSLTECVLNKATNVAHWTTPSLKCIRDPALVHQRPAP
PS
Fc-delK-GG-IL-15(S162A)-GSPLGLAGSGRSDNRGA-IL-15Rα(T2A) (SEQ ID
NO: 414)
>P1703_Fc_delK-GG-L_S162A-GSPLGLAGSGRSDNRGA-R_T2A (2/17R)
EPKSSDKTHTCPPCPAPELLGGPSVFLFPPKPKDTLMISRTPEVTCVVVDVSHEDPEVKFNWY
VDGVEVHNAKTKPREEQYNSTYRVVSVLTVLHQDWLNGKEYKCKVSNKALPAPIEKTISKAKGQPREPQVYTLPP
SREEMTKNQVSLTCLVKGFYPSDIAVEWESNGQPENNYKTTPPVLDSDGSFFLYSKLTVDKSRWQQGNVFSCSVM
HEALHNHYTQKSLSLSPGGGNWVNVISDLKKIEDLIQSMHIDATLYTESDVHPSCKVTAMKCELLELQVISLESG
DASIHDTVENLIILANNSLSSNGNVTESGCKECEELEEKNIKEFLQSFVHIVQMFINTAGSPLGLAGSGRSDNRG
AIACPPPMSVEHADIWVKSYSLYSRERYICNSGFKRKAGTSSLTECVLNKATNVAHWTTPSLKCIRDPALVHQRP
APPS
Fc-delK-GG-IL-15(S162A)-GGSPLGLAGSGRSDNRGGA-IL-15Rα(T2A) (SEQ
ID NO: 415)
>P1704_Fc_delK-GG-L_S162A-GGSPLGLAGSGRSDNRGGA-R_T2A (2/19R)
EPKSSDKTHTCPPCPAPELLGGPSVFLFPPKPKDTLMISRTPEVTCVVVDVSHEDPEVKFNWY
VDGVEVHNAKTKPREEQYNSTYRVVSVLTVLHQDWLNGKEYKCKVSNKALPAPIEKTISKAKGQPREPQVYTLPP
SREEMTKNQVSLTCLVKGFYPSDIAVEWESNGQPENNYKTTPPVLDSDGSFFLYSKLTVDKSRWQQGNVFSCSVM
HEALHNHYTQKSLSLSPGGGNWVNVISDLKKIEDLIQSMHIDATLYTESDVHPSCKVTAMKCELLELQVISLESG
DASIHDTVENLIILANNSLSSNGNVTESGCKECEELEEKNIKEFLQSFVHIVQMFINTAGGSPLGLAGSGRSDNR
GGAIACPPPMSVEHADIWVKSYSLYSRERYICNSGFKRKAGTSSLTECVLNKATNVAHWTTPSLKCIRDPALVHQ
RPAPPS
Fc-delK-GG-IL-15(S162A)-GGGSPLGLAGSGRSDNRGGGA-IL-15Rα(T2A) (SEQ
ID NO: 416)
>P1705_Fc_delK-GG-L_S162A-GGGSPLGLAGSGRSDNRGGGA-R_T2A (2/21R)
EPKSSDKTHTCPPCPAPELLGGPSVFLFPPKPKDTLMISRTPEVTCVVVDVSHEDPEVKFNWY
VDGVEVHNAKTKPREEQYNSTYRVVSVLTVLHQDWLNGKEYKCKVSNKALPAPIEKTISKAKGQPREPQVYTLPP
SREEMTKNQVSLTCLVKGFYPSDIAVEWESNGQPENNYKTTPPVLDSDGSFFLYSKLTVDKSRWQQGNVFSCSVM
HEALHNHYTQKSLSLSPGGGNWVNVISDLKKIEDLIQSMHIDATLYTESDVHPSCKVTAMKCELLELQVISLESG
DASIHDTVENLIILANNSLSSNGNVTESGCKECEELEEKNIKEFLQSFVHIVQMFINTAGGGSPLGLAGSGRSDN
RGGGAIACPPPMSVEHADIWVKSYSLYSRERYICNSGFKRKAGTSSLTECVLNKATNVAHWTTPSLKCIRDPALV
HQRPAPPS
Fc-delK-GG-IL-15(S162A)-GGSGSPLGLAGSGRSDNRGGGGA-IL-15Rα(T2A)
(SEQ ID NO: 417)
>P1706_Fc_delK-GG-L_S162A-GGSGSPLGLAGSGRSDNRGGGGA-R_T2A (2/23R)
EPKSSDKTHTCPPCPAPELLGGPSVFLFPPKPKDTLMISRTPEVTCVVVDVSHEDPEVKFNWY
VDGVEVHNAKTKPREEQYNSTYRVVSVLTVLHQDWLNGKEYKCKVSNKALPAPIEKTISKAKGQPREPQVYTLPP
SREEMTKNQVSLTCLVKGFYPSDIAVEWESNGQPENNYKTTPPVLDSDGSFFLYSKLTVDKSRWQQGNVFSCSVM
HEALHNHYTQKSLSLSPGGGNWVNVISDLKKIEDLIQSMHIDATLYTESDVHPSCKVTAMKCFLLELQVISLESG
DASIHDTVENLIILANNSLSSNGNVTESGCKECEELEEKNIKEFLQSFVHIVQMFINTAGGSGSPLGLAGSGRSD
NRGGGGAIACPPPMSVEHADIWVKSYSLYSRERYICNSGFKRKAGTSSLTECVLNKATNVAHWTTPSLKCIRDPA
LVHQRPAPPS
Fc-delK-GG-IL-15(S162A)-GGSGGSPLGLAGSGRSDNRGGSGGA-IL-15Rα(T2A)
(SEQ ID NO: 418)
>P1707_Fc_delK-GG-L_S162A-GGSGGSPLGLAGSGRSDNRGGSGGA-R_T2A (2/25R)
EPKSSDKTHTCPPCPAPELLGGPSVFLFPPKPKDTLMISRTPEVTCVVVDVSHEDPEVKFNWY
VDGVEVHNAKTKPREEQYNSTYRVVSVLTVLHQDWLNGKEYKCKVSNKALPAPIEKTISKAKGQPREPQVYTLPP
SREEMTKNQVSLTCLVKGFYPSDIAVEWESNGQPENNYKTTPPVLDSDGSFFLYSKLTVDKSRWQQGNVFSCSVM
HEALHNHYTQKSLSLSPGGGNWVNVISDLKKIEDLIQSMHIDATLYTESDVHPSCKVTAMKCFLLELQVISLESG
DASIHDTVENLIILANNSLSSNGNVTESGCKECEELEEKNIKEFLQSFVHIVQMFINTAGGSGGSPLGLAGSGRS
DNRGGSGGAIACPPPMSVEHADIWVKSYSLYSRERYICNSGFKRKAGTSSLTECVLNKATNVAHWTTPSLKCIRD
PALVHQRPAP
Fc-G-IL-15(S162A)-GGSGGSEPKENLYFQGGGSGGSGGGS-IL-15Rα(A50C,
T58C) (SEQ ID NO: 419)
>P1973_Fc-1-L26-PS-R (IL15_S162A, IL15Rα_A50C_T58C)
EPKSSDKTHTCPPCPAPELLGGPSVFLFPPKPKDTLMISRTPEVTCVVVDVSHEDPEVKFNWY
VDGVEVHNAKTKPREEQYNSTYRVVSVLTVLHQDWLNGKEYKCKVSNKALPAPIEKTISKAKGQPREPQVYTLPP
SREEMTKNQVSLTCLVKGFYPSDIAVEWESNGQPENNYKTTPPVLDSDGSFFLYSKLTVDKSRWQQGNVFSCSVM
HEALHNHYTQKSLSLSPGKGNWVNVISDLKKIEDLIQSMHIDATLYTESDVHPSCKVTAMKCFLLELQVISLESG
DASIHDTVENLIILANNSLSSNGNVTESGCKECEELEEKNIKEFLQSFVHIVQMFINTAGGSGGSEPKENLYFQG
GGSGGSGGGSITCPPPMSVEHADIWVKSYSLYSRERYICNSGFKRKAGTSSLTECVLNKCTNVAHWTCPSLKCIR
DPALVHQRPAPPS
Fc-GGSGGS-IL-15(S162A)-GGSGGSEPKENLYFQGGGSGGSGGGS-IL-15Rα(A50C,
T58C) (SEQ ID NO: 420)
>P1974_Fc-6-L26-PS-R (IL15_S162A, IL15Rα_A50C_T58C)
EPKSSDKTHTCPPCPAPELLGGPSVFLFPPKPKDTLMISRTPEVTCVVVDVSHEDPEVKFNWY
VDGVEVHNAKTKPREEQYNSTYRVVSVLTVLHQDWLNGKEYKCKVSNKALPAPIEKTISKAKGQPREPQVYTLPP
SREEMTKNQVSLTCLVKGFYPSDIAVEWESNGQPENNYKTTPPVLDSDGSFFLYSKLTVDKSRWQQGNVFSCSVM
HEALHNHYTQKSLSLSPGKGGSGGSNWVNVISDLKKIEDLIQSMHIDATLYTESDVHPSCKVTAMKCFLLELQVI
SLESGDASIHDTVENLIILANNSLSSNGNVTESGCKECEELEEKNIKEFLQSFVHIVQMFINTAGGSGGSEPKEN
LYFQGGGSGGSGGGSITCPPPMSVEHADIWVKSYSLYSRERYICNSGFKRKAGTSSLTECVLNKCTNVAHWTCPS
LKCIRDPALVHQRPAPPS
Fc-GGSGGSGGSGGS-IL-15(S162A)-GGSGGSEPKENLYFQGGGSGGSGGGS-IL-
15Rα(A50C, T58C) (SEQ ID NO: 421)
>P1975_Fc-12-L26-PS-R (IL15_S162A, IL15Rα_A50C_T58C)
EPKSSDKTHTCPPCPAPELLGGPSVFLFPPKPKDTLMISRTPEVTCVVVDVSHEDPEVKFNWY
VDGVEVHNAKTKPREEQYNSTYRVVSVLTVLHQDWLNGKEYKCKVSNKALPAPIEKTISKAKGQPREPQVYTLPP
SREEMTKNQVSLTCLVKGFYPSDIAVEWESNGQPENNYKTTPPVLDSDGSFFLYSKLTVDKSRWQQGNVFSCSVM
HEALHNHYTQKSLSLSPGKGGSGGSGGSGGSNWVNVISDLKKIEDLIQSMHIDATLYTESDVHPSCKVTAMKCFL
LELQVISLESGDASIHDTVENLIILANNSLSSNGNVTESGCKECEELEEKNIKEFLQSFVHIVQMFINTAGGSGG
SEPKENLYFQGGGSGGSGGGSITCPPPMSVEHADIWVKSYSLYSRERYICNSGFKRKAGTSSLTECVLNKCTNVA
HWTCPSLKCIRDPALVHQRPAPPS
Fc-delK-PLGLAGSGRSDNQGA-IL-15(S162A)-GGSGGSGGSGGS-IL-15Rα (SEQ
ID NO: 422)
>P2162_Fc_delK-PS104-L12R (IL15-S162A)
EPKSSDKTHTCPPCPAPELLGGPSVFLFPPKPKDTLMISRTPEVTCVVVDVSHEDPEVKFNWY
VDGVEVHNAKTKPREEQYNSTYRVVSVLTVLHQDWLNGKEYKCKVSNKALPAPIEKTISKAKGQPREPQVYTLPP
SREEMTKNQVSLTCLVKGFYPSDIAVEWESNGQPENNYKTTPPVLDSDGSFFLYSKLTVDKSRWQQGNVFSCSVM
HEALHNHYTQKSLSLSPGPLGLAGSGRSDNQGANWVNVISDLKKIEDLIQSMHIDATLYTESDVHPSCKVTAMKC
FLLELQVISLESGDASIHDTVENLIILANNSLSSNGNVTESGCKECEELEEKNIKEFLQSFVHIVQMFINTAGGS
GGSGGSGGSITCPPPMSVEHADIWVKSYSLYSRERYICNSGFKRKAGTSSLTECVLNKATNVAHWTTPSLKCIRD
PALVHQRPAPPS
Fc-delK-PLGLAGSGRSDNQGA-IL-15(S162A)-GGSGGSGGS-IL-15Rα (SEQ ID
NO: 423)
>P2163_Fc_delK-PS104-L9R (IL15-S162A)
EPKSSDKTHTCPPCPAPELLGGPSVFLFPPKPKDTLMISRTPEVTCVVVDVSHEDPEVKFNWY
VDGVEVHNAKTKPREEQYNSTYRVVSVLTVLHQDWLNGKEYKCKVSNKALPAPIEKTISKAKGQPREPQVYTLPP
SREEMTKNQVSLTCLVKGFYPSDIAVEWESNGQPENNYKTTPPVLDSDGSFFLYSKLTVDKSRWQQGNVFSCSVM
HEALHNHYTQKSLSLSPGPLGLAGSGRSDNQGANWVNVISDLKKIEDLIQSMHIDATLYTESDVHPSCKVTAMKC
FLLELQVISLESGDASIHDTVENLIILANNSLSSNGNVTESGCKECEELEEKNIKEFLQSFVHIVQMFINTAGGS
GGSGGSITCPPPMSVEHADIWVKSYSLYSRERYICNSGFKRKAGTSSLTECVLNKATNVAHWTTPSLKCIRDPAL
VHQRPAPPS
Fc-delK-PLGLAGSGRSDNQGA-IL-15(S162A)-GGSGGS-IL-15Rα (SEQ ID
NO: 424)
>P2164_Fc_delK-PS104-L6R (IL15-S162A)
EPKSSDKTHTCPPCPAPELLGGPSVFLFPPKPKDTLMISRTPEVTCVVVDVSHEDPEVKFNWY
VDGVEVHNAKTKPREEQYNSTYRVVSVLTVLHQDWLNGKEYKCKVSNKALPAPIEKTISKAKGQPREPQVYTLPP
SREEMTKNQVSLTCLVKGFYPSDIAVEWESNGQPENNYKTTPPVLDSDGSFFLYSKLTVDKSRWQQGNVFSCSVM
HEALHNHYTQKSLSLSPGPLGLAGSGRSDNQGANWVNVISDLKKIEDLIQSMHIDATLYTESDVHPSCKVTAMKC
FLLELQVISLESGDASIHDTVENLIILANNSLSSNGNVTESGCKECEELEEKNIKEFLQSFVHIVQMFINTAGGS
GGSITCPPPMSVEHADIWVKSYSLYSRERYICNSGFKRKAGTSSLTECVLNKATNVAHWTTPSLKCIRDPALVHQ
RPAPPS
Fc-delK-PLGLAGSGRSDNQGA-IL-15(S162A)-GGS-IL-15Rα (SEQ ID
NO: 425)
>P2165_Fc_delK-PS104-L3R (IL15-S162A)
EPKSSDKTHTCPPCPAPELLGGPSVFLFPPKPKDTLMISRTPEVTCVVVDVSHEDPEVKFNWY
VDGVEVHNAKTKPREEQYNSTYRVVSVLTVLHQDWLNGKEYKCKVSNKALPAPIEKTISKAKGQPREPQVYTLPP
SREEMTKNQVSLTCLVKGFYPSDIAVEWESNGQPENNYKTTPPVLDSDGSFFLYSKLTVDKSRWQQGNVFSCSVM
HEALHNHYTQKSLSLSPGPLGLAGSGRSDNQGANWVNVISDLKKIEDLIQSMHIDATLYTESDVHPSCKVTAMKC
FLLELQVISLESGDASIHDTVENLIILANNSLSSNGNVTESGCKECEELEEKNIKEFLQSFVHIVQMFINTAGGS
ITCPPPMSVEHADIWVKSYSLYSRERYICNSGFKRKAGTSSLTECVLNKATNVAHWTTPSLKCIRDPALVHQRPA
PPS
Fc-delK-GSPLGLAGSGRSDNQGSGA-IL-15(S162A)-GGSGGSGGSGGS-IL-15Rα
(SEQ ID NO: 426)
>P2166_Fc_delK-PS106-L12R (IL15-S162A)
EPKSSDKTHTCPPCPAPELLGGPSVFLFPPKPKDTLMISRTPEVTCVVVDVSHEDPEVKFNWY
VDGVEVHNAKTKPREEQYNSTYRVVSVLTVLHQDWLNGKEYKCKVSNKALPAPIEKTISKAKGQPREPQVYTLPP
SREEMTKNQVSLTCLVKGFYPSDIAVEWESNGQPENNYKTTPPVLDSDGSFFLYSKLTVDKSRWQQGNVFSCSVM
HEALHNHYTQKSLSLSPGGSPLGLAGSGRSDNQGSGANWVNVISDLKKIEDLIQSMHIDATLYTESDVHPSCKVT
AMKCFLLELQVISLESGDASIHDTVENLIILANNSLSSNGNVTESGCKECEELEEKNIKEFLQSFVHIVQMFINT
AGGSGGSGGSGGSITCPPPMSVEHADIWVKSYSLYSRERYICNSGFKRKAGTSSLTECVLNKATNVAHWTTPSLK
CIRDPALVHQRPAPPS
Fc-delK-GSPLGLAGSGRSDNQGSGA-IL-15(S162A)-GGSGGSGGS-IL-15Rα (SEQ
ID NO: 427)
>P2167_Fc_delK-PS106-L9R (IL15-S162A)
EPKSSDKTHTCPPCPAPELLGGPSVFLFPPKPKDTLMISRTPEVTCVVVDVSHEDPEVKFNWY
VDGVEVHNAKTKPREEQYNSTYRVVSVLTVLHQDWLNGKEYKCKVSNKALPAPIEKTISKAKGQPREPQVYTLPP
SREEMTKNQVSLTCLVKGFYPSDIAVEWESNGQPENNYKTTPPVLDSDGSFFLYSKLTVDKSRWQQGNVFSCSVM
HEALHNHYTQKSLSLSPGGSPLGLAGSGRSDNQGSGANWVNVISDLKKIEDLIQSMHIDATLYTESDVHPSCKVT
AMKCFLLELQVISLESGDASIHDTVENLIILANNSLSSNGNVTESGCKECEELEEKNIKEFLQSFVHIVQMFINT
AGGSGGSGGSITCPPPMSVEHADIWVKSYSLYSRERYICNSGFKRKAGTSSLTECVLNKATNVAHWTTPSLKCIR
DPALVHQRPAPPS
Fc-delK-GSPLGLAGSGRSDNQGSGA-IL-15(S162A)-GGSGGS-IL-15Rα (SEQ ID
NO: 428)
>P2168_Fc_delK-PS106-L6R (IL15-S162A)
EPKSSDKTHTCPPCPAPELLGGPSVFLFPPKPKDTLMISRTPEVTCVVVDVSHEDPEVKFNWY
VDGVEVHNAKTKPREEQYNSTYRVVSVLTVLHQDWLNGKEYKCKVSNKALPAPIEKTISKAKGQPREPQVYTLPP
SREEMTKNQVSLTCLVKGFYPSDIAVEWESNGQPENNYKTTPPVLDSDGSFFLYSKLTVDKSRWQQGNVFSCSVM
HEALHNHYTQKSLSLSPGGSPLGLAGSGRSDNQGSGANWVNVISDLKKIEDLIQSMHIDATLYTESDVHPSCKVT
AMKCFLLELQVISLESGDASIHDTVENLIILANNSLSSNGNVTESGCKECEELEEKNIKEFLQSFVHIVQMFINT
AGGSGGSITCPPPMSVEHADIWVKSYSLYSRERYICNSGFKRKAGTSSLTECVLNKATNVAHWTTPSLKCIRDPA
LVHQRPAPPS
Fc-delK-GSPLGLAGSGRSDNQGSGA-IL-15(S162A)-GGS-IL-15Rα (SEQ ID
NO: 429)
>P2169_Fc_delK-PS106-L3R (IL15-S162A)
EPKSSDKTHTCPPCPAPELLGGPSVFLFPPKPKDTLMISRTPEVTCVVVDVSHEDPEVKFNWY
VDGVEVHNAKTKPREEQYNSTYRVVSVLTVLHQDWLNGKEYKCKVSNKALPAPIEKTISKAKGQPREPQVYTLPP
SREEMTKNQVSLTCLVKGFYPSDIAVEWESNGQPENNYKTTPPVLDSDGSFFLYSKLTVDKSRWQQGNVFSCSVM
HEALHNHYTQKSLSLSPGGSPLGLAGSGRSDNQGSGANWVNVISDLKKIEDLIQSMHIDATLYTESDVHPSCKVT
AMKCFLLELQVISLESGDASIHDTVENLIILANNSLSSNGNVTESGCKECEELEEKNIKEFLQSFVHIVQMFINT
AGGSITCPPPMSVEHADIWVKSYSLYSRERYICNSGFKRKAGTSSLTECVLNKATNVAHWTTPSLKCIRDPALVH
QRPAPPS

[0385] Examples of Protease Cleavage Products

Expected cleavage products from uPA/Matriptase
cleavage of P1482:
1) Fc-GSLSGR (product from complete cleavage)
Chains 1 and 2
(SEQ ID NO: 430)
EPKSSDKTHTCPPCPAPELLGGPSVFLFPPKPKDTLMISRTPEVTCVVVD
VSHEDPEVKFNWYVDGVEVHNAKTKPREEQYNSTYRVVSVLTVLHQDWLN
GKEYKCKVSNKALPAPIEKTISKAKGQPREPQVYTLPPSREEMTKNQVSL
TCLVKGFYPSDIAVEWESNGQPENNYKTTPPVLDSDGSFFLYSKLTVDKS
RWQQGNVFSCSVMHEALHNHYTQKSLSLSPGKGSLSGR
2) SDNQGS-IL-15-(GGS)3-IL-15Rα (product from
complete cleavage, active)
Chains 1 and 2
(SEQ ID NO: 431)
SDNQGSNWVNVISDLKKIEDLIQSMHIDATLYTESDVHPSCKVTAMKCEL
LELQVISLESGDASIHDTVENLIILANNSLSSNGNVTESGCKECEELEEK
NIKEFLQSFVHIVQMFINTSGGSGGSGGSGGSGGSITCPPPMSVEHADIW
VKSYSLYSRERYICNSGFKRKAGTSSLTECVLNKATNVAHWTTPSLKCIR
DPALVHQRPAPPS
3) Fc-GSLSGRSDNQGS-IL-15-(GGS)3-IL-15Rα/Fc-
GSLSGR/SDNQGS-IL-15-(GGS)3-IL-15Rα (product
from partial cleavage, active)
Chain 1: Fc-GSLSGRSDNQGS-IL-15-(GGS)3-IL-15Rα
(SEQ ID NO: 432)
EPKSSDKTHTCPPCPAPELLGGPSVFLFPPKPKDTLMISRTPEVTCVVVD
VSHEDPEVKFNWYVDGVEVHNAKTKPREEQYNSTYRVVSVLTVLHQDWLN
GKEYKCKVSNKALPAPIEKTISKAKGQPREPQVYTLPPSREEMTKNQVSL
TCLVKGFYPSDIAVEWESNGQPENNYKTTPPVLDSDGSFFLYSKLTVDKS
RWQQGNVFSCSVMHEALHNHYTQKSLSLSPGKGSLSGRSDNQGSNWVNVI
SDLKKIEDLIQSMHIDATLYTESDVHPSCKVTAMKCFLLELQVISLESGD
ASIHDTVENLIILANNSLSSNGNVTESGCKECEELEEKNIKEFLQSFVHI
VQMFINTSGGSGGSGGSGGSGGSITCPPPMSVEHADIWVKSYSLYSRERY
ICNSGFKRKAGTSSLTECVLNKATNVAHWTTPSLKCIRDPALVHQRPAPP
S
Chain 2: Fc-GSLSGR
(SEQ ID NO: 433)
EPKSSDKTHTCPPCPAPELLGGPSVFLFPPKPKDTLMISRTPEVTCVVVD
VSHEDPEVKFNWYVDGVEVHNAKTKPREEQYNSTYRVVSVLTVLHQDWLN
GKEYKCKVSNKALPAPIEKTISKAKGQPREPQVYTLPPSREEMTKNQVSL
TCLVKGFYPSDIAVEWESNGQPENNYKTTPPVLDSDGSFFLYSKLTVDKS
RWQQGNVFSCSVMHEALHNHYTQKSLSLSPGKGSLSGR
Chain 3: SDNQGS-IL-15-(GGS)3-IL-15Rα
(SEQ ID NO: 434)
SDNQGSNWVNVISDLKKIEDLIQSMHIDATLYTESDVHPSCKVTAMKCEL
LELQVISLESGDASIHDTVENLIILANNSLSSNGNVTESGCKECEELEEK
NIKEFLQSFVHIVQMFINTSGGSGGSGGSGGSGGSITCPPPMSVEHADIW
VKSYSLYSRERYICNSGFKRKAGTSSLTECVLNKATNVAHWTTPSLKCIR
DPALVHQRPAPPS
Expected cleavage products from Legumain cleavage
of P1482:
1) Fc-GSLSGRSDN (product from complete cleavage)
Chains 1 and 2
(SEQ ID NO: 435)
EPKSSDKTHTCPPCPAPELLGGPSVFLFPPKPKDTLMISRTPEVTCVVVD
VSHEDPEVKFNWYVDGVEVHNAKTKPREEQYNSTYRVVSVLTVLHQDWLN
GKEYKCKVSNKALPAPIEKTISKAKGQPREPQVYTLPPSREEMTKNQVSL
TCLVKGFYPSDIAVEWESNGQPENNYKTTPPVLDSDGSFFLYSKLTVDKS
RWQQGNVFSCSVMHEALHNHYTQKSLSLSPGKGSLSGRSDN
2) QGS-IL-15-(GGS)3-IL-15Rα (product from
complete cleavage, active)
Chains 1 and 2
(SEQ ID NO: 436)
QGSNWVNVISDLKKIEDLIQSMHIDATLYTESDVHPSCKVTAMKCFLLEL
QVISLESGDASIHDTVENLIILANNSLSSNGNVTESGCKECEELEEKNIK
EFLQSFVHIVQMFINTSGGSGGSGGSGGSGGSITCPPPMSVEHADIWVKS
YSLYSRERYICNSGFKRKAGTSSLTECVLNKATNVAHWTTPSLKCIRDPA
LVHQRPAPPS
3) Fc-GSLSGRSDNQGS-IL-15-(GGS)3-IL-15Rα/Fc-
GSLSGRSDN/QGS-IL-15-(GGS)3-IL-15Rα (product
from partial cleavage, active)
Chain 1: Fc-GSLSGRSDNQGS-IL-15-(GGS)3-IL-15Rα
(SEQ ID NO: 437)
EPKSSDKTHTCPPCPAPELLGGPSVFLFPPKPKDTLMISRTPEVTCVVVD
VSHEDPEVKFNWYVDGVEVHNAKTKPREEQYNSTYRVVSVLTVLHQDWLN
GKEYKCKVSNKALPAPIEKTISKAKGQPREPQVYTLPPSREEMTKNQVSL
TCLVKGFYPSDIAVEWESNGQPENNYKTTPPVLDSDGSFFLYSKLTVDKS
RWQQGNVFSCSVMHEALHNHYTQKSLSLSPGKGSLSGRSDNQGSNWVNVI
SDLKKIEDLIQSMHIDATLYTESDVHPSCKVTAMKCFLLELQVISLESGD
ASIHDTVENLIILANNSLSSNGNVTESGCKECEELEEKNIKEFLQSFVHI
VQMFINTSGGSGGSGGSGGSGGSITCPPPMSVEHADIWVKSYSLYSRERY
ICNSGFKRKAGTSSLTECVLNKATNVAHWTTPSLKCIRDPALVHQRPAPP
S
Chain 2: Fc-GSLSGRSDN
(SEQ ID NO: 438)
EPKSSDKTHTCPPCPAPELLGGPSVFLFPPKPKDTLMISRTPEVTCVVVD
VSHEDPEVKFNWYVDGVEVHNAKTKPREEQYNSTYRVVSVLTVLHQDWLN
GKEYKCKVSNKALPAPIEKTISKAKGQPREPQVYTLPPSREEMTKNQVSL
TCLVKGFYPSDIAVEWESNGQPENNYKTTPPVLDSDGSFFLYSKLTVDKS
RWQQGNVFSCSVMHEALHNHYTQKSLSLSPGKGSLSGRSDN
Chain 3: QGS-IL-15-(GGS)3-IL-15Rα
(SEQ ID NO: 439)
QGSNWVNVISDLKKIEDLIQSMHIDATLYTESDVHPSCKVTAMKCFLLEL
QVISLESGDASIHDTVENLIILANNSLSSNGNVTESGCKECEELEEKNIK
EFLQSFVHIVQMFINTSGGSGGSGGSGGSGGSITCPPPMSVEHADIWVKS
YSLYSRERYICNSGFKRKAGTSSLTECVLNKATNVAHWTTPSLKCIRDPA
LVHQRPAPPS

[0386] Expected Cleavage Products from uPA/Matriptase Cleavage of P1540:

1) Fc-PLGLAGSGR (product from complete cleavage)
Chains 1 and 2
(SEQ ID NO: 440)
EPKSSDKTHTCPPCPAPELLGGPSVFLFPPKPKDTLMISRTPEVTCVVVD
VSHEDPEVKFNWYVDGVEVHNAKTKPREEQYNSTYRVVSVLTVLHQDWLN
GKEYKCKVSNKALPAPIEKTISKAKGQPREPQVYTLPPSREEMTKNQVSL
TCLVKGFYPSDIAVEWESNGQPENNYKTTPPVLDSDGSFFLYSKLTVDKS
RWQQGNVFSCSVMHEALHNHYTQKSLSLSPGKPLGLAGSGR
2) SDNR-IL-15(S162A)-(GGS)3-IL-15Rα (product
from complete cleavage, active)
Chains 1 and 2
(SEQ ID NO: 441)
SDNRNWVNVISDLKKIEDLIQSMHIDATLYTESDVHPSCKVTAMKCFLLE
LQVISLESGDASIHDTVENLIILANNSLSSNGNVTESGCKECEELEEKNI
KEFLQSFVHIVQMFINTAGGSGGSGGSGGSGGSITCPPPMSVEHADIWVK
SYSLYSRERYICNSGFKRKAGTSSLTECVLNKATNVAHWTTPSLKCIRDP
ALVHQRPAPPS
3) Fc-PLGLAGSGRSDNR-IL-15(S162A)-(GGS)3-IL-
15Rα/Fc-PLGLAGSGR/SDNR-IL-15(S162A)-(GGS)3-IL-
15Rα (product from partial cleavage, active)
Chain 1: Fc-PLGLAGSGRSDNR-IL-15(S162A)-(GGS)3-IL-
15Rα
(SEQ ID NO: 442)
EPKSSDKTHTCPPCPAPELLGGPSVFLFPPKPKDTLMISRTPEVTCVVVD
VSHEDPEVKFNWYVDGVEVHNAKTKPREEQYNSTYRVVSVLTVLHQDWLN
GKEYKCKVSNKALPAPIEKTISKAKGQPREPQVYTLPPSREEMTKNQVSL
TCLVKGFYPSDIAVEWESNGQPENNYKTTPPVLDSDGSFFLYSKLTVDKS
RWQQGNVFSCSVMHEALHNHYTQKSLSLSPGKPLGLAGSGRSDNRNWVNV
ISDLKKIEDLIQSMHIDATLYTESDVHPSCKVTAMKCFLLELQVISLESG
DASIHDTVENLIILANNSLSSNGNVTESGCKECEELEEKNIKEFLQSFVH
IVQMFINTAGGSGGSGGSGGSGGSITCPPPMSVEHADIWVKSYSLYSRER
YICNSGFKRKAGTSSLTECVLNKATNVAHWTTPSLKCIRDPALVHQRPAP
PS
Chain 2: Fc-PLGLAGSGR
(SEQ ID NO: 443)
EPKSSDKTHTCPPCPAPELLGGPSVFLFPPKPKDTLMISRTPEVTCVVVD
VSHEDPEVKFNWYVDGVEVHNAKTKPREEQYNSTYRVVSVLTVLHQDWLN
GKEYKCKVSNKALPAPIEKTISKAKGQPREPQVYTLPPSREEMTKNQVSL
TCLVKGFYPSDIAVEWESNGQPENNYKTTPPVLDSDGSFFLYSKLTVDKS
RWQQGNVFSCSVMHEALHNHYTQKSLSLSPGKPLGLAGSGR
Chain 3: SDNR-IL-15(S162A)-(GGS)3-IL-15Rα
(SEQ ID NO: 44)
SDNRNWVNVISDLKKIEDLIQSMHIDATLYTESDVHPSCKVTAMKCFLLE
LQVISLESGDASIHDTVENLIILANNSLSSNGNVIESGCKECEELEEKNI
KEFLQSFVHIVQMFINTAGGSGGSGGSGGSGGSITCPPPMSVEHADIWVK
SYSLYSRERYICNSGFKRKAGTSSLTECVLNKAINVAHWTTPSLKCIRDP
ALVHQRPAPPS

[0387] Expected Cleavage Products from MMP-2/MMP-9 Cleavage of P1540:

1) Fc-PLG (product from complete cleavage)
Chains 1 and 2
(SEQ ID NO: 445)
EPKSSDKTHTCPPCPAPELLGGPSVFLFPPKPKDTLMISRTPEVTCVVVD
VSHEDPEVKFNWYVDGVEVHNAKTKPREEQYNSTYRVVSVLTVLHQDWLN
GKEYKCKVSNKALPAPIEKTISKAKGQPREPQVYTLPPSREEMTKNQVSL
TCLVKGFYPSDIAVEWESNGQPENNYKTTPPVLDSDGSFFLYSKLTVDKS
RWQQGNVFSCSVMHEALHNHYTQKSLSLSPGKPLG
2) LAGSGRSDNR-IL-15(S162A)-(GGS)3-IL-15Rα
(product from complete cleavage, active)
Chains 1 and 2
(SEQ ID NO: 446)
LAGSGRSDNRNWVNVISDLKKIEDLIQSMHIDATLYTESDVHPSCKVTAM
KCFLLELQVISLESGDASIHDTVENLIILANNSLSSNGNVTESGCKECEE
LEEKNIKEFLQSFVHIVQMFINTAGGSGGSGGSGGSGGSITCPPPMSVEH
ADIWVKSYSLYSRERYICNSGFKRKAGTSSLTECVLNKATNVAHWTTPSL
KCIRDPALVHQRPAPPS
3) Fc-PLGLAGSGRSDNR-IL-15(S162A)-(GGS)3-IL-15Rα/
Fc-PLG/LAGSGRSDNR-IL-15(S162A)-(GGS)3-IL-15Rα
(product from partial cleavage, active)
Chain 1: Fc-PLGLAGSGRSDNR-IL-15(S162A)-(GGS)3-IL-
15Rα
(SEQ ID NO: 447)
EPKSSDKTHTCPPCPAPELLGGPSVFLFPPKPKDTLMISRTPEVTCVVVD
VSHEDPEVKFNWYVDGVEVHNAKTKPREEQYNSTYRVVSVLTVLHQDWLN
GKEYKCKVSNKALPAPIEKTISKAKGQPREPQVYTLPPSREEMTKNQVSL
TCLVKGFYPSDIAVEWESNGQPENNYKTTPPVLDSDGSFFLYSKLTVDKS
RWQQGNVFSCSVMHEALHNHYTQKSLSLSPGKPLGLAGSGRSDNRNWVNV
ISDLKKIEDLIQSMHIDATLYTESDVHPSCKVTAMKCFLLELQVISLESG
DASIHDTVENLIILANNSLSSNGNVTESGCKECEELEEKNIKEFLQSFVH
IVQMFINTAGGSGGSGGSGGSGGSITCPPPMSVEHADIWVKSYSLYSRER
YICNSGFKRKAGTSSLTECVLNKATNVAHWTTPSLKCIRDPALVHQRPAP
PS
Chain 2: Fc-PLG
(SEQ ID NO: 448)
EPKSSDKTHTCPPCPAPELLGGPSVFLFPPKPKDTLMISRTPEVTCVVVD
VSHEDPEVKFNWYVDGVEVHNAKTKPREEQYNSTYRVVSVLTVLHQDWLN
GKEYKCKVSNKALPAPIEKTISKAKGQPREPQVYTLPPSREEMTKNQVSL
TCLVKGFYPSDIAVEWESNGQPENNYKTTPPVLDSDGSFFLYSKLTVDKS
RWQQGNVFSCSVMHEALHNHYTQKSLSLSPGKPLG
Chain 3: LAGSGRSDNR-IL-15(S162A)-(GGS)3-IL-15Rα
(SEQ ID NO: 449)
LAGSGRSDNRNWVNVISDLKKIEDLIQSMHIDATLYTESDVHPSCKVTAM
KCFLLELQVISLESGDASIHDTVENLIILANNSLSSNGNVTESGCKECEE
LEEKNIKEFLQSFVHIVQMFINTAGGSGGSGGSGGSGGSITCPPPMSVEH
ADIWVKSYSLYSRERYICNSGFKRKAGTSSLTECVLNKATNVAHWTTPSL
KCIRDPALVHQRPAPPS

[0388] Expected Cleavage Products from uPA/Matriptase Cleavage of P1636:

1) Fc-delK-GGGSKTHTGGGS-IL-15(S162A)-GSPLGLAGSGR
(product from complete cleavage)
Chains 1 and 2
(SEQ ID NO: 450)
EPKSSDKTHTCPPCPAPELLGGPSVFLFPPKPKDTLMISRTPEVTCVVVD
VSHEDPEVKFNWYVDGVEVHNAKTKPREEQYNSTYRVVSVLTVLHQDWLN
GKEYKCKVSNKALPAPIEKTISKAKGQPREPQVYTLPPSREEMTKNQVSL
TCLVKGFYPSDIAVEWESNGQPENNYKTTPPVLDSDGSFFLYSKLTVDKS
RWQQGNVFSCSVMHEALHNHYTQKSLSLSPGGGGSKTHTGGGSNWVNVIS
DLKKIEDLIQSMHIDATLYTESDVHPSCKVTAMKCFLLELQVISLESGDA
SIHDTVENLIILANNSLSSNGNVTESGCKECEELEEKNIKEFLQSFVHIV
QMFINTAGSPLGLAGSGR
2) SDNRGS-IL-15Rα (product from complete cleavage,
active)
Chains 1 and 2
(SEQ ID NO: 451)
SDNRGSITCPPPMSVEHADIWVKSYSLYSRERYICNSGFKRKAGTSSLTE
CVLNKATNVAHWTTPSLKCIRDPALVHQRPAPPS
3) Fc-delK-GGGSKTHTGGGS-IL-15(S162A)-GSPLGLAGSGRSD
NRGS-IL-15Rα/Fc-delK-GGGSKTHTGGGS-IL-15(S162A)-
GSPLGLAGSGR/DNRGS-IL-15Rα (product from partial
cleavage, active)
Chain 1: Fc-delK-GGGSKTHTGGGS-IL-15(S162A)-
GSPLGLAGSGRSDNRGS-IL-15Rα
(SEQ ID NO: 452)
EPKSSDKTHTCPPCPAPELLGGPSVFLFPPKPKDTLMISRTPEVTCVVVD
VSHEDPEVKFNWYVDGVEVHNAKTKPREEQYNSTYRVVSVLTVLHQDWLN
GKEYKCKVSNKALPAPIEKTISKAKGQPREPQVYTLPPSREEMTKNQVSL
TCLVKGFYPSDIAVEWESNGQPENNYKTTPPVLDSDGSFFLYSKLTVDKS
RWQQGNVFSCSVMHEALHNHYTQKSLSLSPGGGGSKTHTGGGSNWVNVIS
DLKKIEDLIQSMHIDATLYTESDVHPSCKVTAMKCFLLELQVISLESGDA
SIHDTVENLIILANNSLSSNGNVTESGCKECEELEEKNIKEFLQSFVHIV
QMFINTAGSPLGLAGSGRSDNRGSITCPPPMSVEHADIWVKSYSLYSRER
YICNSGFKRKAGTSSLTECVLNKATNVAHWTTPSLKCIRDPALVHQRPAP
PS
Chain 2: Fc-delK-GGGSKTHTGGGS-IL-15(S162A)-
GSPLGLAGSGR
(SEQ ID NO: 453)
EPKSSDKTHTCPPCPAPELLGGPSVFLFPPKPKDTLMISRTPEVTCVVVD
VSHEDPEVKFNWYVDGVEVHNAKTKPREEQYNSTYRVVSVLTVLHQDWLN
GKEYKCKVSNKALPAPIEKTISKAKGQPREPQVYTLPPSREEMTKNQVSL
TCLVKGFYPSDIAVEWESNGQPENNYKTTPPVLDSDGSFFLYSKLTVDKS
RWQQGNVFSCSVMHEALHNHYTQKSLSLSPGGGGSKTHTGGGSNWVNVIS
DLKKIEDLIQSMHIDATLYTESDVHPSCKVTAMKCFLLELQVISLESGDA
SIHDTVENLIILANNSLSSNGNVIESGCKECEELEEKNIKEFLQSFVHIV
QMFINTAGSPLGLAGSGR
Chain 3: SDNRGS-IL-15Rα
(SEQ ID NO: 454)
SDNRGSITCPPPMSVEHADIWVKSYSLYSRERYICNSGFKRKAGTSSLTE
CVLNKAINVAHWTTPSLKCIRDPALVHQRPAPPS

[0389] Expected Cleavage Products from MMP-2/MMP-9 Cleavage of P1636:

1) Fc-delK-GGGSKTHTGGGS-IL-15(S162A)-GSPLG
(product from complete cleavage)
Chains 1 and 2
(SEQ ID NO: 455)
EPKSSDKTHTCPPCPAPELLGGPSVFLFPPKPKDTLMISRTPEVTCVVVD
VSHEDPEVKFNWYVDGVEVHNAKTKPREEQYNSTYRVVSVLTVLHQDWLN
GKEYKCKVSNKALPAPIEKTISKAKGQPREPQVYTLPPSREEMTKNQVSL
TCLVKGFYPSDIAVEWESNGQPENNYKTTPPVLDSDGSFFLYSKLTVDKS
RWQQGNVFSCSVMHEALHNHYTQKSLSLSPGGGGSKTHTGGGSNWVNVIS
DLKKIEDLIQSMHIDATLYTESDVHPSCKVTAMKCFLLELQVISLESGDA
SIHDTVENLIILANNSLSSNGNVTESGCKECEELEEKNIKEFLQSFVHIV
QMFINTAGSPLG
2) LAGSGRSDNRGS-IL-15Rα (product from complete
cleavage, active)
Chains 1 and 2
(SEQ ID NO: 456)
LAGSGRSDNRGSITCPPPMSVEHADIWVKSYSLYSRERYICNSGFKRKAG
TSSLTECVLNKATNVAHWTTPSLKCIRDPALVHQRPAPPS
3) Fc-delK-GGGSKTHTGGGS-IL-15(S162A)-
GSPLGLAGSGRSDNRGS-IL-15Rα/Fc-delK-GGGSKTHTGGGS-
IL-15(S162A)-GSPLG/LAGSGRSDNRGS-IL-15Rα
(product from partial cleavage, active)
Chain 1: Fc-delK-GGGSKTHTGGGS-IL-15(S162A)-
GSPLGLAGSGRSDNRGS-IL-15Rα
(SEQ ID NO: 457)
EPKSSDKTHTCPPCPAPELLGGPSVFLFPPKPKDTLMISRTPEVTCVVVD
VSHEDPEVKFNWYVDGVEVHNAKTKPREEQYNSTYRVVSVLTVLHQDWLN
GKEYKCKVSNKALPAPIEKTISKAKGQPREPQVYTLPPSREEMTKNQVSL
TCLVKGFYPSDIAVEWESNGQPENNYKTTPPVLDSDGSFFLYSKLTVDKS
RWQQGNVFSCSVMHEALHNHYTQKSLSLSPGGGGSKTHTGGGSNWVNVIS
DLKKIEDLIQSMHIDATLYTESDVHPSCKVTAMKCFLLELQVISLESGDA
SIHDTVENLIILANNSLSSNGNVTESGCKECEELEEKNIKEFLQSFVHIV
QMFINTAGSPLGLAGSGRSDNRGSITCPPPMSVEHADIWVKSYSLYSRER
YICNSGFKRKAGTSSLTECVLNKATNVAHWTTPSLKCIRDPALVHQRPAP
PS
Chain 2: Fc-delK-GGGSKTHTGGGS-IL-15(S162A)-GSPLG
(SEQ ID NO: 458)
EPKSSDKTHTCPPCPAPELLGGPSVFLFPPKPKDTLMISRTPEVTCVVVD
VSHEDPEVKFNWYVDGVEVHNAKTKPREEQYNSTYRVVSVLTVLHQDWLN
GKEYKCKVSNKALPAPIEKTISKAKGQPREPQVYTLPPSREEMTKNQVSL
TCLVKGFYPSDIAVEWESNGQPENNYKTTPPVLDSDGSFFLYSKLTVDKS
RWQQGNVFSCSVMHEALHNHYTQKSLSLSPGGGGSKTHIGGGSNWVNVIS
DLKKIEDLIQSMHIDATLYTESDVHPSCKVTAMKCELLELQVISLESGDA
SIHDTVENLIILANNSLSSNGNVIESGCKECEELEEKNIKEFLQSFVHIV
QMFINTAGSPLG
Chain 3: LAGSGRSDNRGS-IL-15Rα
(SEQ ID NO: 459)
LAGSGRSDNRGSITCPPPMSVEHADIWVKSYSLYSRERYICNSGFKRKAG
TSSLTECVLNKATNVAHWTTPSLKCIRDPALVHQRPAPPS

[0390] Expected Cleavage Products from uPA/Matriptase Cleavage of P1658:

1) Fc-delK-PLGLAGSGR (product from complete
cleavage)
Chains 1 and 2
(SEQ ID NO: 460)
EPKSSDKTHTCPPCPAPELLGGPSVFLFPPKPKDTLMISRTPEVTCVVVD
VSHEDPEVKFNWYVDGVEVHNAKTKPREEQYNSTYRVVSVLTVLHQDWLN
GKEYKCKVSNKALPAPIEKTISKAKGQPREPQVYTLPPSREEMTKNQVSL
TCLVKGFYPSDIAVEWESNGQPENNYKTTPPVLDSDGSFFLYSKLTVDKS
RWQQGNVFSCSVMHEALHNHYTQKSLSLSPGPLGLAGSGR
2) SDNQGA-IL-15(S162A)-(GGS)3-IL-15Rα
(product from complete cleavage, active)
Chains 1 and 2
(SEQ ID NO: 461)
SDNQGANWVNVISDLKKIEDLIQSMHIDATLYTESDVHPSCKVTAMKCFL
LELQVISLESGDASIHDTVENLIILANNSLSSNGNVTESGCKECEELEEK
NIKEFLQSFVHIVQMFINTAGGSGGSGGSGGSGGSITCPPPMSVEHADIW
VKSYSLYSRERYICNSGFKRKAGTSSLTECVLNKATNVAHWTTPSLKCIR
DPALVHQRPAPPS
3) Fc-delK-PLGLAGSGRSDNQGA-IL-15(S162A)-(GGS)3-IL-
15Rα/Fc-delK-PLGLAGSGR/SDNQGA-IL-15(S162A)-
(GGS)3-IL-15Rα (product from partial cleavage,
active)
Chain 1: Fc-delK-PLGLAGSGRSDNQGA-IL-15(S162A)-
(GGS)3-IL-15Rα
(SEQ ID NO: 462)
EPKSSDKTHTCPPCPAPELLGGPSVFLFPPKPKDTLMISRTPEVTCVVVD
VSHEDPEVKFNWYVDGVEVHNAKTKPREEQYNSTYRVVSVLTVLHQDWLN
GKEYKCKVSNKALPAPIEKTISKAKGQPREPQVYTLPPSREEMTKNQVSL
TCLVKGFYPSDIAVEWESNGQPENNYKTTPPVLDSDGSFFLYSKLTVDKS
RWQQGNVFSCSVMHEALHNHYTQKSLSLSPGPLGLAGSGRSDNQGANWVN
VISDLKKIEDLIQSMHIDATLYTESDVHPSCKVTAMKCFLLELQVISLES
GDASIHDTVENLIILANNSLSSNGNVTESGCKECEELEEKNIKEFLQSFV
HIVQMFINTAGGSGGSGGSGGSGGSITCPPPMSVEHADIWVKSYSLYSRE
RYICNSGFKRKAGTSSLTECVLNKATNVAHWTTPSLKCIRDPALVHQRPA
PPS
Chain 2: Fc-delK-PLGLAGSGR
(SEQ ID NO: 463)
EPKSSDKTHTCPPCPAPELLGGPSVFLFPPKPKDTLMISRTPEVTCVVVD
VSHEDPEVKFNWYVDGVEVHNAKTKPREEQYNSTYRVVSVLTVLHQDWLN
GKEYKCKVSNKALPAPIEKTISKAKGQPREPQVYTLPPSREEMTKNQVSL
TCLVKGFYPSDIAVEWESNGQPENNYKTTPPVLDSDGSFFLYSKLTVDKS
RWQQGNVFSCSVMHEALHNHYTQKSLSLSPGPLGLAGSGR
Chain 3: SDNQGA-IL-15(S162A)-(GGS)3-IL-15Rα
(SEQ ID NO: 464)
SDNQGANWVNVISDLKKIEDLIQSMHIDATLYTESDVHPSCKVTAMKCFL
LELQVISLESGDASIHDTVENLIILANNSLSSNGNVIESGCKECEELEEK
NIKEFLQSFVHIVQMFINTAGGSGGSGGSGGSGGSITCPPPMSVEHADIW
VKSYSLYSRERYICNSGFKRKAGTSSLTECVLNKAINVAHWTTPSLKCIR
DPALVHQRPAPPS

[0391] Expected Cleavage Products from MMP-2/MMP-9 Cleavage of P1658:

1) Fc-delK-PLG (product from complete cleavage)
Chains 1 and 2
(SEQ ID NO: 465)
EPKSSDKTHTCPPCPAPELLGGPSVFLFPPKPKDTLMISRTPEVTCVVVD
VSHEDPEVKFNWYVDGVEVHNAKTKPREEQYNSTYRVVSVLTVLHQDWLN
GKEYKCKVSNKALPAPIEKTISKAKGQPREPQVYTLPPSREEMTKNQVSL
TCLVKGFYPSDIAVEWESNGQPENNYKTTPPVLDSDGSFFLYSKLTVDKS
RWQQGNVFSCSVMHEALHNHYTQKSLSLSPGPLG
2) LAGSGRSDNQGA-IL-15(S162A)-(GGS)3-IL-15Rα
(product from complete cleavage, active)
Chains 1 and 2
(SEQ ID NO: 466)
LAGSGRSDNQGANWVNVISDLKKIEDLIQSMHIDATLYTESDVHPSCKVT
AMKCFLLELQVISLESGDASIHDTVENLIILANNSLSSNGNVTESGCKEC
EELEEKNIKEFLQSFVHIVQMFINTAGGSGGSGGSGGSGGSITCPPPMSV
EHADIWVKSYSLYSRERYICNSGFKRKAGTSSLTECVLNKATNVAHWTTP
SLKCIRDPALVHQRPAPPS
3) Fc-delK-PLGLAGSGRSDNQGA-IL-15(S162A)-(GGS)3-IL-
15Rα/Fc-delK-PLG/LAGSGRSDNQGA-IL-15(S162A)-
(GGS)3-IL-15Rα (product from partial cleavage,
active)
Chain 1: Fc-delK-PLGLAGSGRSDNQGA-IL-15(S162A)-
(GGS)3-IL-15Rα
(SEQ ID NO: 467)
EPKSSDKTHTCPPCPAPELLGGPSVFLFPPKPKDTLMISRTPEVTCVVVD
VSHEDPEVKFNWYVDGVEVHNAKTKPREEQYNSTYRVVSVLTVLHQDWLN
GKEYKCKVSNKALPAPIEKTISKAKGQPREPQVYTLPPSREEMTKNQVSL
TCLVKGFYPSDIAVEWESNGQPENNYKTTPPVLDSDGSFFLYSKLTVDKS
RWQQGNVFSCSVMHEALHNHYTQKSLSLSPGPLGLAGSGRSDNQGANWVN
VISDLKKIEDLIQSMHIDATLYTESDVHPSCKVTAMKCFLLELQVISLES
GDASIHDTVENLIILANNSLSSNGNVTESGCKECEELEEKNIKEFLQSFV
HIVQMFINTAGGSGGSGGSGGSGGSITCPPPMSVEHADIWVKSYSLYSRE
RYICNSGFKRKAGTSSLTECVLNKATNVAHWTTPSLKCIRDPALVHQRPA
PPS
Chain 2: Fc-delK-PLG
(SEQ ID NO: 468)
EPKSSDKTHTCPPCPAPELLGGPSVFLFPPKPKDTLMISRTPEVTCVVVD
VSHEDPEVKFNWYVDGVEVHNAKTKPREEQYNSTYRVVSVLTVLHQDWLN
GKEYKCKVSNKALPAPIEKTISKAKGQPREPQVYTLPPSREEMTKNQVSL
TCLVKGFYPSDIAVEWESNGQPENNYKTTPPVLDSDGSFFLYSKLTVDKS
RWQQGNVFSCSVMHEALHNHYTQKSLSLSPGPLG
Chain 3: LAGSGRSDNQGA-IL-15(S162A)-(GGS)3-IL-15Rα
(SEQ ID NO: 469)
LAGSGRSDNQGANWVNVISDLKKIEDLIQSMHIDATLYTESDVHPSCKVT
AMKCFLLELQVISLESGDASIHDTVENLIILANNSLSSNGNVTESGCKEC
EELEEKNIKEFLQSFVHIVQMFINTAGGSGGSGGSGGSGGSITCPPPMSV
EHADIWVKSYSLYSRERYICNSGFKRKAGTSSLTECVLNKATNVAHWTTP
SLKCIRDPALVHQRPAPPS

[0392] Expected Cleavage Products from uPA/Matriptase Cleavage of P1701:

1) Fc-delK-GG-IL-15(S162A)-GGSGGSPLGLAGSGR
(product from complete cleavage)
Chains 1 and 2
(SEQ ID NO: 470)
EPKSSDKTHTCPPCPAPELLGGPSVFLFPPKPKDTLMISRTPEVTCVVVD
VSHEDPEVKFNWYVDGVEVHNAKTKPREEQYNSTYRVVSVLTVLHQDWLN
GKEYKCKVSNKALPAPIEKTISKAKGQPREPQVYTLPPSREEMTKNQVSL
TCLVKGFYPSDIAVEWESNGQPENNYKTTPPVLDSDGSFFLYSKLTVDKS
RWQQGNVFSCSVMHEALHNHYTQKSLSLSPGGGNWVNVISDLKKIEDLIQ
SMHIDATLYTESDVHPSCKVTAMKCFLLELQVISLESGDASIHDTVENLI
ILANNSLSSNGNVTESGCKECEELEEKNIKEFLQSFVHIVQMFINTAGGS
GGSPLGLAGSGR
2) SDNQGGSGGA-IL-15Rα(T2A) (product from complete
cleavage, active)
Chains 1 and 2
(SEQ ID NO: 471)
SDNQGGSGGAIACPPPMSVEHADIWVKSYSLYSRERYICNSGFKRKAGTS
SLTECVLNKATNVAHWTTPSLKCIRDPALVHQRPAPPS
3) Fc-delK-GG-IL-15(S162A)-
GGSGGSPLGLAGSGRSDNQGGSGGA-IL-15Rα(T2A)/Fc-delK-
GG-IL-15(S162A)-GGSGGSPLGLAGSGR/SDNQGGSGGA-IL-
15Rα(T2A) (product from partial cleavage,
active)
Chain 1: Fc-delK-GG-IL-15(S162A)-
GGSGGSPLGLAGSGRSDNQGGSGGA-IL-15Rα(T2A)
(SEQ ID NO: 472)
EPKSSDKTHTCPPCPAPELLGGPSVFLFPPKPKDTLMISRTPEVTCVVVD
VSHEDPEVKFNWYVDGVEVHNAKTKPREEQYNSTYRVVSVLTVLHQDWLN
GKEYKCKVSNKALPAPIEKTISKAKGQPREPQVYTLPPSREEMTKNQVSL
TCLVKGFYPSDIAVEWESNGQPENNYKTTPPVLDSDGSFFLYSKLTVDKS
RWQQGNVFSCSVMHEALHNHYTQKSLSLSPGGGNWVNVISDLKKIEDLIQ
SMHIDATLYTESDVHPSCKVTAMKCFLLELQVISLESGDASIHDTVENLI
ILANNSLSSNGNVTESGCKECEELEEKNIKEFLQSFVHIVQMFINTAGGS
GGSPLGLAGSGRSDNQGGSGGAIACPPPMSVEHADIWVKSYSLYSRERYI
CNSGFKRKAGTSSLTECVLNKATNVAHWTTPSLKCIRDPALVHQRPAPPS
Chain 2: Fc-delK-GG-IL-15(S162A)-GGSGGSPLGLAGSGR
(SEQ ID NO: 473)
EPKSSDKTHTCPPCPAPELLGGPSVFLFPPKPKDTLMISRTPEVTCVVVD
VSHEDPEVKFNWYVDGVEVHNAKTKPREEQYNSTYRVVSVLTVLHQDWLN
GKEYKCKVSNKALPAPIEKTISKAKGQPREPQVYTLPPSREEMTKNQVSL
TCLVKGFYPSDIAVEWESNGQPENNYKTTPPVLDSDGSFFLYSKLTVDKS
RWQQGNVFSCSVMHEALHNHYTQKSLSLSPGGGNWVNVISDLKKIEDLIQ
SMHIDATLYTESDVHPSCKVTAMKCFLLELQVISLESGDASIHDTVENLI
ILANNSLSSNGNVTESGCKECEELEEKNIKEFLQSFVHIVQMFINTAGGS
GGSPLGLAGSGR
Chain 3: SDNQGGSGGA-IL-15Rα(T2A)
(SEQ ID NO: 474)
SDNQGGSGGAIACPPPMSVEHADIWVKSYSLYSRERYICNSGFKRKAGTS
SLTECVLNKATNVAHWTTPSLKCIRDPALVHQRPAPPS

[0393] Expected Cleavage Products from MMP-2/MMP-9 Cleavage of P1701:

1) Fc-delK-GG-IL-15(S162A)-GGSGGSPLG (product from
complete cleavage)
Chains 1 and 2
(SEQ ID NO: 475)
EPKSSDKTHTCPPCPAPELLGGPSVFLFPPKPKDTLMISRTPEVTCVVVD
VSHEDPEVKFNWYVDGVEVHNAKTKPREEQYNSTYRVVSVLTVLHQDWLN
GKEYKCKVSNKALPAPIEKTISKAKGQPREPQVYTLPPSREEMTKNQVSL
TCLVKGFYPSDIAVEWESNGQPENNYKTTPPVLDSDGSFFLYSKLTVDKS
RWQQGNVFSCSVMHEALHNHYTQKSLSLSPGGGNWVNVISDLKKIEDLIQ
SMHIDATLYTESDVHPSCKVTAMKCFLLELQVISLESGDASIHDTVENLI
ILANNSLSSNGNVTESGCKECEELEEKNIKEFLQSFVHIVQMFINTAGGS
GGSPLG
2) LAGSGRSDNQGGSGGA-IL-15Rα(T2A) (product from
complete cleavage, active)
Chains 1 and 2
(SEQ ID NO: 476)
LAGSGRSDNQGGSGGAIACPPPMSVEHADIWVKSYSLYSRERYICNSGFK
RKAGTSSLTECVLNKATNVAHWTTPSLKCIRDPALVHQRPAPPS
3) Fc-delK-GG-IL-15(S162A)-
GGSGGSPLGLAGSGRSDNQGGSGGA-IL-15Rα(T2A)/Fc-delK-
GG-IL-15(S162A)-GGSGGSPLG/LAGSGRSDNQGGSGGA-IL-15Rα
(T2A) (product from partial cleavage, active)
Chain 1: Fc-delK-GG-IL-15(S162A)-
GGSGGSPLGLAGSGRSDNQGGSGGA-IL-15Rα(T2A)
(SEQ ID NO: 477)
EPKSSDKTHTCPPCPAPELLGGPSVFLFPPKPKDTLMISRTPEVTCVVVD
VSHEDPEVKFNWYVDGVEVHNAKTKPREEQYNSTYRVVSVLTVLHQDWLN
GKEYKCKVSNKALPAPIEKTISKAKGQPREPQVYTLPPSREEMTKNQVSL
TCLVKGFYPSDIAVEWESNGQPENNYKTTPPVLDSDGSFFLYSKLTVDKS
RWQQGNVFSCSVMHEALHNHYTQKSLSLSPGGGNWVNVISDLKKIEDLIQ
SMHIDATLYTESDVHPSCKVTAMKCFLLELQVISLESGDASIHDTVENLI
ILANNSLSSNGNVTESGCKECEELEEKNIKEFLQSFVHIVQMFINTAGGS
GGSPLGLAGSGRSDNQGGSGGAIACPPPMSVEHADIWVKSYSLYSRERYI
CNSGFKRKAGTSSLTECVLNKATNVAHWTTPSLKCIRDPALVHQRPAPPS
Chain 2: Fc-delK-GG-IL-15(S162A)-GGSGGSPLG
(SEQ ID NO: 478)
EPKSSDKTHTCPPCPAPELLGGPSVFLFPPKPKDTLMISRTPEVTCVVVD
VSHEDPEVKFNWYVDGVEVHNAKTKPREEQYNSTYRVVSVLTVLHQDWLN
GKEYKCKVSNKALPAPIEKTISKAKGQPREPQVYTLPPSREEMTKNQVSL
TCLVKGFYPSDIAVEWESNGQPENNYKTTPPVLDSDGSFFLYSKLTVDKS
RWQQGNVFSCSVMHEALHNHYTQKSLSLSPGGGNWVNVISDLKKIEDLIQ
SMHIDATLYTESDVHPSCKVTAMKCFLLELQVISLESGDASIHDTVENLI
ILANNSLSSNGNVTESGCKECEELEEKNIKEFLQSFVHIVQMFINTAGGS
GGSPLG
Chain 3: LAGSGRSDNQGGSGGA-IL-15Rα(T2A)
(SEQ ID NO: 479)
LAGSGRSDNQGGSGGAIACPPPMSVEHADIWVKSYSLYSRERYICNSGFK
RKAGTSSLTECVLNKATNVAHWTTPSLKCIRDPALVHQRPAPPS

[0394] Expected Cleavage Products from TEV Cleavage of P1973:

1) Fc-G-IL-15(S162A)-GGSGGSEPKENLYFQ (product from
complete cleavage)
Chains 1 and 2
(SEQ ID NO: 480)
EPKSSDKTHTCPPCPAPELLGGPSVFLFPPKPKDTLMISRTPEVTCVVVD
VSHEDPEVKFNWYVDGVEVHNAKTKPREEQYNSTYRVVSVLTVLHQDWLN
GKEYKCKVSNKALPAPIEKTISKAKGQPREPQVYTLPPSREEMTKNQVSL
TCLVKGFYPSDIAVEWESNGQPENNYKTTPPVLDSDGSFFLYSKLTVDKS
RWQQGNVFSCSVMHEALHNHYTQKSLSLSPGKGNWVNVISDLKKIEDLIQ
SMHIDATLYTESDVHPSCKVTAMKCFLLELQVISLESGDASIHDTVENLI
ILANNSLSSNGNVTESGCKECEELEEKNIKEFLQSFVHIVQMFINTAGGS
GGSEPKENLYFQ
2) GGGSGGSGGGS-IL-15Rα(A50C, T58C) (product
from complete cleavage, active)
Chains 1 and 2
(SEQ ID NO: 481)
GGGSGGSGGGSITCPPPMSVEHADIWVKSYSLYSRERYICNSGFKRKAGT
SSLTECVLNKCTNVAHWTCPSLKCIRDPALVHQRPAPPS
3) Fc-G-IL-15(S162A)-GGSGGSEPKENLYFQGGGSGGSGGGS-
IL-15Rα(A50C, T58C)/Fc-G-IL-15(S162A)-GGSGGSEPK
ENLYFQ/GGGSGGSGGGS-IL-15Rα(A50C, T58C)
(product from partial cleavage, active)
Chain 1: Fc-G-IL-15(S162A)-
GGSGGSEPKENLYFQGGGSGGSGGGS-IL-15Rα(A50C, T58C)
(SEQ ID NO: 482)
EPKSSDKTHTCPPCPAPELLGGPSVFLFPPKPKDTLMISRTPEVTCVVVD
VSHEDPEVKFNWYVDGVEVHNAKTKPREEQYNSTYRVVSVLTVLHQDWLN
GKEYKCKVSNKALPAPIEKTISKAKGQPREPQVYTLPPSREEMTKNQVSL
TCLVKGFYPSDIAVEWESNGQPENNYKTTPPVLDSDGSFFLYSKLTVDKS
RWQQGNVFSCSVMHEALHNHYTQKSLSLSPGKGNWVNVISDLKKIEDLIQ
SMHIDATLYTESDVHPSCKVTAMKCFLLELQVISLESGDASIHDTVENLI
ILANNSLSSNGNVTESGCKECEELEEKNIKEFLQSFVHIVQMFINTAGGS
GGSEPKENLYFQGGGSGGSGGGSITCPPPMSVEHADIWVKSYSLYSRERY
ICNSGFKRKAGTSSLTECVLNKCTNVAHWTCPSLKCIRDPALVHQRPAPP
S
Chain 2: Fc-G-IL-15(S162A)-GGSGGSEPKENLYFQ
(SEQ ID NO: 483)
EPKSSDKTHTCPPCPAPELLGGPSVFLFPPKPKDTLMISRTPEVTCVVVD
VSHEDPEVKFNWYVDGVEVHNAKTKPREEQYNSTYRVVSVLTVLHQDWLN
GKEYKCKVSNKALPAPIEKTISKAKGQPREPQVYTLPPSREEMTKNQVSL
TCLVKGFYPSDIAVEWESNGQPENNYKTTPPVLDSDGSFFLYSKLTVDKS
RWQQGNVFSCSVMHEALHNHYTQKSLSLSPGKGNWVNVISDLKKIEDLIQ
SMHIDATLYTESDVHPSCKVTAMKCFLLELQVISLESGDASIHDTVENLI
ILANNSLSSNGNVTESGCKECEELEEKNIKEFLQSFVHIVQMFINTAGGS
GGSEPKENLYFQ
Chain 3: GGGSGGSGGGS-IL-15Rα(A50C, T58C)
(SEQ ID NO: 484)
GGGSGGSGGGSITCPPPMSVEHADIWVKSYSLYSRERYICNSGFKRKAGT
SSLTECVLNKCTNVAHWTCPSLKCIRDPALVHQRPAPPS

[0395] Expected Cleavage Products from uPA/Matriptase Cleavage of P2169:

1) Fc-delK-GSPLGLAGSGR (product from complete
cleavage)
Chains 1 and 2
(SEQ ID NO: 485)
EPKSSDKTHTCPPCPAPELLGGPSVFLFPPKPKDTLMISRTPEVTCVVVD
VSHEDPEVKFNWYVDGVEVHNAKTKPREEQYNSTYRVVSVLTVLHQDWLN
GKEYKCKVSNKALPAPIEKTISKAKGQPREPQVYTLPPSREEMTKNQVSL
TCLVKGFYPSDIAVEWESNGQPENNYKTTPPVLDSDGSFFLYSKLTVDKS
RWQQGNVFSCSVMHEALHNHYTQKSLSLSPGGSPLGLAGSGR
2) SDNQGSGA-IL-15(S162A)-GGS-IL-15Rα (product
from complete cleavage, active)
Chains 1 and 2
(SEQ ID NO: 486)
SDNQGSGANWVNVISDLKKIEDLIQSMHIDATLYTESDVHPSCKVTAMKC
FLLELQVISLESGDASIHDTVENLIILANNSLSSNGNVTESGCKECEELE
EKNIKEFLQSFVHIVQMFINTAGGSITCPPPMSVEHADIWVKSYSLYSRE
RYICNSGFKRKAGTSSLTECVLNKATNVAHWTTPSLKCIRDPALVHQRPA
PPS
3) Fc-delK-GSPLGLAGSGRSDNQGSGA-IL-15(S162A)-GGS-IL-
15Rα/Fc-delK-GSPLGLAGSGR/SDNQGSGA-IL-15(S162A)-
GGS-IL-15Rα (product from partial cleavage,
active)
Chain 1: Fc-delK-GSPLGLAGSGRSDNQGSGA-IL-15(S162A)-
GGS-IL-15Rα
(SEQ ID NO: 487)
EPKSSDKTHTCPPCPAPELLGGPSVFLFPPKPKDTLMISRTPEVTCVVVD
VSHEDPEVKFNWYVDGVEVHNAKTKPREEQYNSTYRVVSVLTVLHQDWLN
GKEYKCKVSNKALPAPIEKTISKAKGQPREPQVYTLPPSREEMTKNQVSL
TCLVKGFYPSDIAVEWESNGQPENNYKTTPPVLDSDGSFFLYSKLTVDKS
RWQQGNVFSCSVMHEALHNHYTQKSLSLSPGGSPLGLAGSGRSDNQGSGA
NWVNVISDLKKIEDLIQSMHIDATLYTESDVHPSCKVTAMKCFLLELQVI
SLESGDASIHDTVENLIILANNSLSSNGNVTESGCKECEELEEKNIKEFL
QSFVHIVQMFINTAGGSITCPPPMSVEHADIWVKSYSLYSRERYICNSGF
KRKAGTSSLTECVLNKATNVAHWTTPSLKCIRDPALVHQRPAPPS
Chain 2: Fc-delK-GSPLGLAGSGR
(SEQ ID NO: 488)
EPKSSDKTHTCPPCPAPELLGGPSVFLFPPKPKDTLMISRTPEVTCVVVD
VSHEDPEVKFNWYVDGVEVHNAKTKPREEQYNSTYRVVSVLTVLHQDWLN
GKEYKCKVSNKALPAPIEKTISKAKGQPREPQVYTLPPSREEMTKNQVSL
TCLVKGFYPSDIAVEWESNGQPENNYKTTPPVLDSDGSFFLYSKLTVDKS
RWQQGNVFSCSVMHEALHNHYTQKSLSLSPGGSPLGLAGSGR
Chain 3: SDNQGSGA-IL-15(S162A)-GGS-IL-15Rα
(SEQ ID NO: 489)
SDNQGSGANWVNVISDLKKIEDLIQSMHIDATLYTESDVHPSCKVTAMKC
FLLELQVISLESGDASIHDTVENLIILANNSLSSNGNVTESGCKECEELE
EKNIKEFLQSFVHIVQMFINTAGGSITCPPPMSVEHADIWVKSYSLYSRE
RYICNSGFKRKAGTSSLTECVLNKATNVAHWTTPSLKCIRDPALVHQRPA
PPS

[0396] Expected Cleavage Products from MMP-2/MMP-9 Cleavage of P2169:

1) Fc-delK-GSPLG (product from complete cleavage)
Chains 1 and 2
(SEQ ID NO: 490)
EPKSSDKTHTCPPCPAPELLGGPSVFLFPPKPKDTLMISRTPEVTCVVVDVSHEDPEVKFNWY
VDGVEVHNAKTKPREEQYNSTYRVVSVLTVLHQDWLNGKEYKCKVSNKALPAPIEKTISKAKGQPREPQVYTLPP
SREEMTKNQVSLTCLVKGFYPSDIAVEWESNGQPENNYKTTPPVLDSDGSFFLYSKLTVDKSRWQQGNVFSCSVM
HEALHNHYTQKSLSLSPGGSPLG
2) LAGSGRSDNQGSGA-IL-15(S162A)-GGS-IL-15Rα (product from
complete cleavage, active)
Chains 1 and 2
(SEQ ID NO: 491)
LAGSGRSDNQGSGANWVNVISDLKKIEDLIQSMHIDATLYTESDVHPSCKVTAMKCFLLELQV
ISLESGDASIHDTVENLIILANNSLSSNGNVTESGCKECEELEEKNIKEFLQSFVHIVQMFINTAGGSITCPPPM
SVEHADIWVKSYSLYSRERYICNSGFKRKAGTSSLTECVLNKATNVAHWTTPSLKCIRDPALVHQRPAPPS
3) Fc-delK-GSPLGLAGSGRSDNQGSGA-IL-15(S162A)-GGS-IL-15Rα/Fc-
delK-GSPLG/LAGSGRSDNQGSGA-IL-15(S162A)-GGS-IL-15Rα (product from partial
cleavage, active)
Chain 1: Fc-delK-GSPLGLAGSGRSDNQGSGA-IL-15(S162A)-GGS-IL-15Rα
(SEQ ID NO: 492)
EPKSSDKTHTCPPCPAPELLGGPSVFLFPPKPKDTLMISRTPEVTCVVVDVSHEDPEVKFNWY
VDGVEVHNAKTKPREEQYNSTYRVVSVLTVLHQDWLNGKEYKCKVSNKALPAPIEKTISKAKGQPREPQVYTLPP
SREEMTKNQVSLTCLVKGFYPSDIAVEWESNGQPENNYKTTPPVLDSDGSFFLYSKLTVDKSRWQQGNVFSCSVM
HEALHNHYTQKSLSLSPGGSPLGLAGSGRSDNQGSGANWVNVISDLKKIEDLIQSMHIDATLYTESDVHPSCKVT
AMKCFLLELQVISLESGDASIHDTVENLIILANNSLSSNGNVTESGCKECEELEEKNIKEFLQSFVHIVQMFINT
AGGSITCPPPMSVEHADIWVKSYSLYSRERYICNSGFKRKAGTSSLTECVLNKATNVAHWTTPSLKCIRDPALVH
QRPAPPS
Chain 2: Fc-delK-GSPLG
(SEQ ID NO: 493)
EPKSSDKTHTCPPCPAPELLGGPSVFLFPPKPKDTLMISRTPEVTCVVVDVSHEDPEVKFNWY
VDGVEVHNAKTKPREEQYNSTYRVVSVLTVLHQDWLNGKEYKCKVSNKALPAPIEKTISKAKGQPREPQVYTLPP
SREEMTKNQVSLTCLVKGFYPSDIAVEWESNGQPENNYKTTPPVLDSDGSFFLYSKLTVDKSRWQQGNVFSCSVM
HEALHNHYTQKSLSLSPGGSPLG
Chain 3: LAGSGRSDNQGSGA-IL-15(S162A)-GGS-IL-15Rα
(SEQ ID NO: 494)
LAGSGRSDNQGSGANWVNVISDLKKIEDLIQSMHIDATLYTESDVHPSCKVTAMKCFLLELQV
ISLESGDASIHDTVENLIILANNSLSSNGNVTESGCKECEELEEKNIKEFLQSFVHIVQMFINTAGGSITCPPPM
SVEHADIWVKSYSLYSRERYICNSGFKRKAGTSSLTECVLNKATNVAHWTTPSLKCIRDPALVHQRPAPPS
P15431450: FAP-H1L1-huIgG1-PLGLAGSGRSDNR-IL-15(S162A)-
GGSGGSGGSGGSGGS-IL-15Rα
>Chains 1 and 2: FAP-H1-hG1-PS53-L15R
(SEQ ID NO: 495)
EVQLVQSGAEVKKPGESLKISCKGSGYTFTENIIHWVRQMPGKGLEWIGWFHPGSGSIKYNEKEKDQ
VTISADKSISTAYLQWSSLKASDTAMYFCARHGGTGRGAMDYWGQGTLVTVSSASTKGPSVFPLAPSSKSTSGGT
AALGCLVKDYFPEPVTVSWNSGALTSGVHTFPAVLQSSGLYSLSSVVTVPSSSLGTQTYICNVNHKPSNTKVDKK
VEPKSCDKTHTCPPCPAPELLGGPSVFLFPPKPKDTLMISRTPEVTCVVVDVSHEDPEVKFNWYVDGVEVHNAKT
KPREEQYNSTYRVVSVLTVLHQDWLNGKEYKCKVSNKALPAPIEKTISKAKGQPREPQVYTLPPSRDELTKNQVS
LTCLVKGFYPSDIAVEWESNGQPENNYKTTPPVLDSDGSFFLYSKLTVDKSRWQQGNVFSCSVMHEALHNHYTQK
SLSLSPGKPLGLAGSGRSDNRNwvnvisdlkkiedliqsmhidatlytesdvhpsckvtamkcfllelqvisles
gdasihdtvenliilannslssngnvtesgckeceeleeknikeflqsfvhivqmfintAGGSGGSGGSGGSGGS
ITCPPPMSVEHADIWVKSYSLYSRERYICNSGFKRKAGTSSLTECVLNKATNVAHWTTPSLKCIRDPALVHQRPA
PPS
>Chains 3 and 4: FAP-L1-huIgKLC
(SEQ ID NO: 496)
DIVMTQTPLSLSVTPGQPASISCRASKSVSTSAYSYMHWYLQKPGQSPQLLIYLASNLESGVP
DRFSGSGSGTDFTLKISRVEAEDVGVYYCQHSRELPYTEGQGTKLEIKRTVAAPSVFIFPPSDEQLKSGTASVVC
LLNNFYPREAKVQWKVDNALQSGNSQESVTEQDSKDSTYSLSSTLTLSKADYEKHKVYACEVTHQGLSSPVTKSF
NRGEC
P16401450: FAP-H1L1-huIgG1-delK-PLGLAGSGRSDNR-IL-15(S162A)-
GGSGGSGGSGGSGGS-IL-15Rα
>Chains 1 and 2: FAP-H1-hG1-delK-PS53-L15R
(SEQ ID NO: 497)
EVQLVQSGAEVKKPGESLKISCKGSGYTFTENIIHWVRQMPGKGLEWIGWFHPGSGSIKYNEKEKDQ
VTISADKSISTAYLQWSSLKASDTAMYFCARHGGTGRGAMDYWGQGTLVTVSSASTKGPSVFPLAPSSKSTSGGT
AALGCLVKDYFPEPVTVSWNSGALTSGVHTFPAVLQSSGLYSLSSVVTVPSSSLGTQTYICNVNHKPSNTKVDKK
VEPKSCDKTHTCPPCPAPELLGGPSVFLFPPKPKDTLMISRTPEVTCVVVDVSHEDPEVKFNWYVDGVEVHNAKT
KPREEQYNSTYRVVSVLTVLHQDWLNGKEYKCKVSNKALPAPIEKTISKAKGQPREPQVYTLPPSRDELTKNQVS
LTCLVKGFYPSDIAVEWESNGQPENNYKTTPPVLDSDGSFFLYSKLTVDKSRWQQGNVFSCSVMHEALHNHYTQK
SLSLSPGPLGLAGSGRSDNRNwvnvisdlkkiedliqsmhidatlytesdvhpsckvtamkcfllelqvislesg
dasihdtvenliilannslssngnvtesgckeceeleeknikeflqsfvhivqmfintAGGSGGSGGSGGSGGSI
TCPPPMSVEHADIWVKSYSLYSRERYICNSGFKRKAGTSSLTECVLNKATNVAHWTTPSLKCIRDPALVHQRPAP
PS
>Chains 3 and 4: FAP-L1-huIgKLC
(SEQ ID NO: 498)
DIVMTQTPLSLSVTPGQPASISCRASKSVSTSAYSYMHWYLQKPGQSPQLLIYLASNLESGVPDRFS
GSGSGTDFTLKISRVEAEDVGVYYCQHSRELPYTEGQGTKLEIKRTVAAPSVFIFPPSDEQLKSGTASVVCLLNN
FYPREAKVQWKVDNALQSGNSQESVTEQDSKDSTYSLSSTLTLSKADYEKHKVYACEVTHQGLSSPVTKSFNRGE
C
P18121450: FAP-H1L1-huIgG1(L234A, L235A, P329A)-delK-GG-IL-
15(S162A)-GGSGGSPLGLAGSGRSDNQGGSGGA-IL-15Rα(T2A)
>Chains 1 and 2: FAP-H1-huIgG1(AAA)_delK-GG-L_(S162A)-GGSGGSP
LGLAGSGRSDNQGGSGGA-R_T2A
(SEQ ID NO: 499)
EVQLVQSGAEVKKPGESLKISCKGSGYTFTENIIHWVRQMPGKGLEWIGWFHPGSGSIKYNEK
FKDQVTISADKSISTAYLQWSSLKASDTAMYFCARHGGTGRGAMDYWGQGTLVTVSSASTKGPSVFPLAPSSKST
SGGTAALGCLVKDYFPEPVTVSWNSGALTSGVHTFPAVLQSSGLYSLSSVVTVPSSSLGTQTYICNVNHKPSNTK
VDKKVEPKSCDKTHTCPPCPAPEAAGGPSVFLFPPKPKDTLMISRTPEVTCVVVDVSHEDPEVKFNWYVDGVEVH
NAKTKPREEQYNSTYRVVSVLTVLHQDWLNGKEYKCKVSNKALAAPIEKTISKAKGQPREPQVYTLPPSRDELTK
NQVSLTCLVKGFYPSDIAVEWESNGQPENNYKTTPPVLDSDGSFFLYSKLTVDKSRWQQGNVFSCSVMHEALHNH
YTQKSLSLSPGGGNWVNVISDLKKIEDLIQSMHIDATLYTESDVHPSCKVTAMKCFLLELQVISLESGDASIHDT
VENLIILANNSLSSNGNVTESGCKECEELEEKNIKEFLQSFVHIVQMFINTAGGSGGSPLGLAGSGRSDNQGGSG
GAIACPPPMSVEHADIWVKSYSLYSRERYICNSGFKRKAGTSSLTECVLNKATNVAHWTTPSLKCIRDPALVHQR
PAPPS
>Chains 3 and 4: FAP-L1-huIgKLC
(SEQ ID NO: 500)
DIVMTQTPLSLSVTPGQPASISCRASKSVSTSAYSYMHWYLQKPGQSPQLLIYLASNLESGVP
DRFSGSGSGTDFTLKISRVEAEDVGVYYCQHSRELPYTFGQGTKLEIKRTVAAPSVFIFPPSDEQLKSGTASVVC
LLNNFYPREAKVQWKVDNALQSGNSQESVTEQDSKDSTYSLSSTLTLSKADYEKHKVYACEVTHQGLSSPVTKSF
NRGEC
P18131453: FAP-H2L2-huIgG1(L234A, L235A, P329A)-delK-GG-IL-
15(S162A)-GGSGGSPLGLAGSGRSDNQGGSGGA-IL-15Rα(T2A)
>Chains 1 and 2: FAP-H2-huIgG1(AAA)_delK-GG-L_(S162A)-GGSGGSPL
GLAGSGRSDNQGGSGGA-R_T2A
(SEQ ID NO: 501)
QVQLVQSGAEVKKPGASVKVSCKASGYTFTENIIHWVRQAPGQGLEWMGWFHPGSGSIKYNEK
FKDRVTMTADTSTSTVYMELSSLRSEDTAVYYCARHGGTGRGAMDYWGQGTLVTVSSASTKGPSVFPLAPSSKST
SGGTAALGCLVKDYFPEPVTVSWNSGALTSGVHTFPAVLQSSGLYSLSSVVTVPSSSLGTQTYICNVNHKPSNTK
VDKKVEPKSCDKTHTCPPCPAPEAAGGPSVFLFPPKPKDTLMISRTPEVTCVVVDVSHEDPEVKFNWYVDGVEVH
NAKTKPREEQYNSTYRVVSVLTVLHQDWLNGKEYKCKVSNKALAAPIEKTISKAKGQPREPQVYTLPPSRDELTK
NQVSLTCLVKGFYPSDIAVEWESNGQPENNYKTTPPVLDSDGSFFLYSKLTVDKSRWQQGNVFSCSVMHEALHNH
YTQKSLSLSPGGGNWVNVISDLKKIEDLIQSMHIDATLYTESDVHPSCKVTAMKCFLLELQVISLESGDASIHDT
VENLIILANNSLSSNGNVTESGCKECEELEEKNIKEFLQSFVHIVQMFINTAGGSGGSPLGLAGSGRSDNQGGSG
GAIACPPPMSVEHADIWVKSYSLYSRERYICNSGFKRKAGTSSLTECVLNKATNVAHWTTPSLKCIRDPALVHQR
PAPPS
>Chains 3 and 4: FAP-L2-huIgKLC
(SEQ ID NO: 502)
DIQMTQSPSSLSASVGDRVTITCRASKSVSTSAYSYMHWYQQKPGKAPKLLIYLASNLESGVP
SRFSGSGSGTDFTLTISSLQPEDFATYYCQHSRELPYTEGQGTKLEIKRTVAAPSVFIFPPSDEQLKSGTASVVC
LLNNFYPREAKVQWKVDNALQSGNSQESVTEQDSKDSTYSLSSTLTLSKADYEKHKVYACEVTHQGLSSPVTKSF
NRGEC
P18141563: FAP-H4L4-huIgG1(L234A, L235A, P329A)-delK-GG-IL-
15(S162A)-GGSGGSPLGLAGSGRSDNQGGSGGA-IL-15Rα(T2A)
>Chains 1 and 2: FAP-H4-huIgG1(AAA)_delK-GG-L_(S162A)-GGSGGSPL
GLAGSGRSDNQGGSGGA-R_T2A
(SEQ ID NO: 503)
EVQLLESGGGLVQPGGSLRLSCAASGFTFSSYAMSWVRQAPGKGLEWVSAIIGSGASTYYADS
VKGRFTISRDNSKNTLYLQMNSLRAEDTAVYYCAKGWEGGFNYWGQGTLVTVSSASTKGPSVFPLAPSSKSTSGG
TAALGCLVKDYFPEPVTVSWNSGALTSGVHTFPAVLQSSGLYSLSSVVTVPSSSLGTQTYICNVNHKPSNTKVDK
KVEPKSCDKTHTCPPCPAPEAAGGPSVFLFPPKPKDTLMISRTPEVTCVVVDVSHEDPEVKFNWYVDGVEVHNAK
TKPREEQYNSTYRVVSVLTVLHQDWLNGKEYKCKVSNKALAAPIEKTISKAKGQPREPQVYTLPPSRDELTKNQV
SLTCLVKGFYPSDIAVEWESNGQPENNYKTTPPVLDSDGSFFLYSKLTVDKSRWQQGNVFSCSVMHEALHNHYTQ
KSLSLSPGGGNWVNVISDLKKIEDLIQSMHIDATLYTESDVHPSCKVTAMKCFLLELQVISLESGDASIHDTVEN
LIILANNSLSSNGNVTESGCKECEELEEKNIKEFLQSFVHIVQMFINTAGGSGGSPLGLAGSGRSDNQGGSGGAI
ACPPPMSVEHADIWVKSYSLYSRERYICNSGFKRKAGTSSLTECVLNKATNVAHWTTPSLKCIRDPALVHQRPAP
PS
>Chains 3 and 4: FAP-L4-huIgKLC
(SEQ ID NO: 504)
EIVLTQSPGTLSLSPGERATLSCRASQSVTSSYLAWYQQKPGQAPRLLINVGSRRATGIPDRF
SGSGSGTDFTLTISRLEPEDFAVYYCQQGIMLPPTEGQGTKVEIKRTVAAPSVFIFPPSDEQLKSGTASVVCLLN
NFYPREAKVQWKVDNALQSGNSQESVTEQDSKDSTYSLSSTLTLSKADYEKHKVYACEVTHQGLSSPVTKSFNRG
EC
P18151450: FAP-H1L1-huIgG1(L234A, L235A, P329A)-delK-GG-IL-
15(S162A)-GGSGGSPLGLAGSGRSDNHGGSGGA-IL-15Rα(T2A)
>Chains 1 and 2: FAP-H1-huIgG1(AAA)_delK-GG-L_(S162A)-GGSGGSP
LGLAGSGRSDNHGGSGGA-R_T2A
(SEQ ID NO: 505)
EVQLVQSGAEVKKPGESLKISCKGSGYTFTENIIHWVRQMPGKGLEWIGWFHPGSGSIKYNEK
FKDQVTISADKSISTAYLQWSSLKASDTAMYFCARHGGTGRGAMDYWGQGTLVTVSSASTKGPSVFPLAPSSKST
SGGTAALGCLVKDYFPEPVTVSWNSGALTSGVHTFPAVLQSSGLYSLSSVVTVPSSSLGTQTYICNVNHKPSNTK
VDKKVEPKSCDKTHTCPPCPAPEAAGGPSVFLFPPKPKDTLMISRTPEVTCVVVDVSHEDPEVKFNWYVDGVEVH
NAKTKPREEQYNSTYRVVSVLTVLHQDWLNGKEYKCKVSNKALAAPIEKTISKAKGQPREPQVYTLPPSRDELTK
NQVSLTCLVKGFYPSDIAVEWESNGQPENNYKTTPPVLDSDGSFFLYSKLTVDKSRWQQGNVFSCSVMHEALHNH
YTQKSLSLSPGGGNWVNVISDLKKIEDLIQSMHIDATLYTESDVHPSCKVTAMKCFLLELQVISLESGDASIHDT
VENLIILANNSLSSNGNVTESGCKECEELEEKNIKEFLQSFVHIVQMFINTAGGSGGSPLGLAGSGRSDNHGGSG
GAIACPPPMSVEHADIWVKSYSLYSRERYICNSGFKRKAGTSSLTECVLNKATNVAHWTTPSLKCIRDPALVHQR
PAPPS
>Chains 3 and 4: FAP-L1-huIgKLC
(SEQ ID NO: 506)
DIVMTQTPLSLSVTPGQPASISCRASKSVSTSAYSYMHWYLQKPGQSPQLLIYLASNLESGVP
DRFSGSGSGTDFTLKISRVEAEDVGVYYCQHSRELPYTFGQGTKLEIKRTVAAPSVFIFPPSDEQLKSGTASVVC
LLNNFYPREAKVQWKVDNALQSGNSQESVTEQDSKDSTYSLSSTLTLSKADYEKHKVYACEVTHQGLSSPVTKSF
NRGEC
P18161453: FAP-H2L2-huIgG1(L234A, L235A, P329A)-delK-GG-IL-
15(S162A)-GGSGGSPLGLAGSGRSDNHGGSGGA-IL-15Rα(T2A)
>Chains 1 and 2: FAP-H2-huIgG1(AAA)_delK-GG-L_(S162A)-GGSGGSP
LGLAGSGRSDNHGGSGGA-R_T2A
(SEQ ID NO: 507)
QVQLVQSGAEVKKPGASVKVSCKASGYTFTENIIHWVRQAPGQGLEWMGWFHPGSGSIKYNEK
FKDRVTMTADTSTSTVYMELSSLRSEDTAVYYCARHGGTGRGAMDYWGQGTLVTVSSASTKGPSVFPLAPSSKST
SGGTAALGCLVKDYFPEPVTVSWNSGALTSGVHTFPAVLQSSGLYSLSSVVTVPSSSLGTQTYICNVNHKPSNTK
VDKKVEPKSCDKTHTCPPCPAPEAAGGPSVFLFPPKPKDTLMISRTPEVTCVVVDVSHEDPEVKFNWYVDGVEVH
NAKTKPREEQYNSTYRVVSVLTVLHQDWLNGKEYKCKVSNKALAAPIEKTISKAKGQPREPQVYTLPPSRDELTK
NQVSLTCLVKGFYPSDIAVEWESNGQPENNYKTTPPVLDSDGSFFLYSKLTVDKSRWQQGNVFSCSVMHEALHNH
YTQKSLSLSPGGGNWVNVISDLKKIEDLIQSMHIDATLYTESDVHPSCKVTAMKCFLLELQVISLESGDASIHDT
VENLIILANNSLSSNGNVTESGCKECEELEEKNIKEFLQSFVHIVQMFINTAGGSGGSPLGLAGSGRSDNHGGSG
GAIACPPPMSVEHADIWVKSYSLYSRERYICNSGFKRKAGTSSLTECVLNKATNVAHWTTPSLKCIRDPALVHQR
PAPPS
>Chains 3 and 4: FAP-L1-huIgKLC
(SEQ ID NO: 508)
DIQMTQSPSSLSASVGDRVTITCRASKSVSTSAYSYMHWYQQKPGKAPKLLIYLASNLESGVP
SRFSGSGSGTDFTLTISSLQPEDFATYYCQHSRELPYTEGQGTKLEIKRTVAAPSVFIFPPSDEQLKSGTASVVC
LLNNFYPREAKVQWKVDNALQSGNSQESVTEQDSKDSTYSLSSTLTLSKADYEKHKVYACEVTHQGLSSPVTKSF
NRGEC
P18171563: FAP-H4L4-huIgG1(L234A, L235A, P329A)-delK-GG-IL-
15(S162A)-GGSGGSPLGLAGSGRSDNHGGSGGA-IL-15Rα(T2A)
>Chains 1 and 2: FAP-H4-huIgG1(AAA)_delK-GG-L_(S162A)-GGSGGSP
LGLAGSGRSDNHGGSGGA-R_T2A
(SEQ ID NO: 509)
EVQLLESGGGLVQPGGSLRLSCAASGFTFSSYAMSWVRQAPGKGLEWVSAIIGSGASTYYADS
VKGRFTISRDNSKNTLYLQMNSLRAEDTAVYYCAKGWEGGFNYWGQGTLVTVSSASTKGPSVFPLAPSSKSTSGG
TAALGCLVKDYFPEPVTVSWNSGALTSGVHTFPAVLQSSGLYSLSSVVTVPSSSLGTQTYICNVNHKPSNTKVDK
KVEPKSCDKTHTCPPCPAPEAAGGPSVFLFPPKPKDTLMISRTPEVTCVVVDVSHEDPEVKFNWYVDGVEVHNAK
TKPREEQYNSTYRVVSVLTVLHQDWLNGKEYKCKVSNKALAAPIEKTISKAKGQPREPQVYTLPPSRDELTKNQV
SLTCLVKGFYPSDIAVEWESNGQPENNYKTTPPVLDSDGSFFLYSKLTVDKSRWQQGNVFSCSVMHEALHNHYTQ
KSLSLSPGGGNWVNVISDLKKIEDLIQSMHIDATLYTESDVHPSCKVTAMKCFLLELQVISLESGDASIHDTVEN
LIILANNSLSSNGNVTESGCKECEELEEKNIKEFLQSFVHIVQMFINTAGGSGGSPLGLAGSGRSDNHGGSGGAI
ACPPPMSVEHADIWVKSYSLYSRERYICNSGFKRKAGTSSLTECVLNKATNVAHWTTPSLKCIRDPALVHQRPAP
PS
>Chains 3 and 4: FAP-L4-huIgKLC
(SEQ ID NO: 510)
EIVLTQSPGTLSLSPGERATLSCRASQSVTSSYLAWYQQKPGQAPRLLINVGSRRATGIPDRF
SGSGSGTDFTLTISRLEPEDFAVYYCQQGIMLPPTEGQGTKVEIKRTVAAPSVFIFPPSDEQLKSGTASVVCLLN
NFYPREAKVQWKVDNALQSGNSQESVTEQDSKDSTYSLSSTLTLSKADYEKHKVYACEVTHQGLSSPVTKSFNRG
EC
P19681450: FAP-H1L1-huIgG1(L234A, L235A, P329A)-delK-GG-IL-
15(K86A, S162A)-GGSGGSPLGLAGSGRSDNQGGSGGA-IL-15Rα(T2A)
>Chains 1 and 2: FAP-H1-huIgG1(AAA)_delK-GG-L_(K86A, S162A)-
GGSGGS PLGLAGSGRSDNQGGSGGA-R_T2A
(SEQ ID NO: 511)
EVQLVQSGAEVKKPGESLKISCKGSGYTFTENIIHWVRQMPGKGLEWIGWFHPGSGSIKYNEK
FKDQVTISADKSISTAYLQWSSLKASDTAMYFCARHGGTGRGAMDYWGQGTLVTVSSASTKGPSVFPLAPSSKST
SGGTAALGCLVKDYFPEPVTVSWNSGALTSGVHTFPAVLQSSGLYSLSSVVTVPSSSLGTQTYICNVNHKPSNTK
VDKKVEPKSCDKTHTCPPCPAPEAAGGPSVFLFPPKPKDTLMISRTPEVTCVVVDVSHEDPEVKFNWYVDGVEVH
NAKTKPREEQYNSTYRVVSVLTVLHQDWLNGKEYKCKVSNKALAAPIEKTISKAKGQPREPQVYTLPPSRDELTK
NQVSLTCLVKGFYPSDIAVEWESNGQPENNYKTTPPVLDSDGSFFLYSKLTVDKSRWQQGNVFSCSVMHEALHNH
YTQKSLSLSPGGGNWVNVISDLKKIEDLIQSMHIDATLYTESDVHPSCKVTAMKCFLLELQVISLESGDASIHDT
VENLIILANNSLSSNGNVTESGCAECEELEEKNIKEFLQSFVHIVQMFINTAGGSGGSPLGLAGSGRSDNQGGSG
GAIACPPPMSVEHADIWVKSYSLYSRERYICNSGFKRKAGTSSLTECVLNKATNVAHWTTPSLKCIRDPALVHQR
PAPPS
>Chains 3 and 4: FAP-L1-huIgKLC
(SEQ ID NO: 512)
DIVMTQTPLSLSVTPGQPASISCRASKSVSTSAYSYMHWYLQKPGQSPQLLIYLASNLESGVP
DRFSGSGSGTDFTLKISRVEAEDVGVYYCQHSRELPYTFGQGTKLEIKRTVAAPSVFIFPPSDEQLKSGTASVVC
LLNNFYPREAKVQWKVDNALQSGNSQESVTEQDSKDSTYSLSSTLTLSKADYEKHKVYACEVTHQGLSSPVTKSF
NRGEC
P19691450: FAP-H1L1-huIgG1(L234A, L235A, P329A)-delK-GG-IL-
15(K86R, S162A)-GGSGGSPLGLAGSGRSDNQGGSGGA-IL-15Rα(T2A)
>Chains 1 and 2: FAP-H1-huIgG1(AAA)_delK-GG-L_(K86R, S162A)-
GGSGGS PLGLAGSGRSDNQGGSGGA-R_T2A
(SEQ ID NO: 513)
EVQLVQSGAEVKKPGESLKISCKGSGYTFTENIIHWVRQMPGKGLEWIGWFHPGSGSIKYNEK
FKDQVTISADKSISTAYLQWSSLKASDTAMYFCARHGGTGRGAMDYWGQGTLVTVSSASTKGPSVFPLAPSSKST
SGGTAALGCLVKDYFPEPVTVSWNSGALTSGVHTFPAVLQSSGLYSLSSVVTVPSSSLGTQTYICNVNHKPSNTK
VDKKVEPKSCDKTHTCPPCPAPEAAGGPSVFLFPPKPKDTLMISRTPEVTCVVVDVSHEDPEVKFNWYVDGVEVH
NAKTKPREEQYNSTYRVVSVLTVLHQDWLNGKEYKCKVSNKALAAPIEKTISKAKGQPREPQVYTLPPSRDELTK
NQVSLTCLVKGFYPSDIAVEWESNGQPENNYKTTPPVLDSDGSFFLYSKLTVDKSRWQQGNVFSCSVMHEALHNH
YTQKSLSLSPGGGNWVNVISDLKKIEDLIQSMHIDATLYTESDVHPSCKVTAMKCFLLELQVISLESGDASIHDT
VENLIILANNSLSSNGNVTESGCRECEELEEKNIKEFLQSFVHIVQMFINTAGGSGGSPLGLAGSGRSDNQGGSG
GAIACPPPMSVEHADIWVKSYSLYSRERYICNSGFKRKAGTSSLTECVLNKATNVAHWTTPSLKCIRDPALVHQR
PAPPS
>Chains 3 and 4: FAP-L1-huIgKLC
(SEQ ID NO: 514)
DIVMTQTPLSLSVTPGQPASISCRASKSVSTSAYSYMHWYLQKPGQSPQLLIYLASNLESGVP
DRFSGSGSGTDFTLKISRVEAEDVGVYYCQHSRELPYTFGQGTKLEIKRTVAAPSVFIFPPSDEQLKSGTASVVC
LLNNFYPREAKVQWKVDNALQSGNSQESVTEQDSKDSTYSLSSTLTLSKADYEKHKVYACEVTHQGLSSPVTKSF
NRGEC
P24872158: FAP-H6L7-huIgG1(L234A, L235A, P329A)-delK-GGSPLGLAGGGS-
IL-15(S162A)-GGGSGGGSGRSDNQGGGSG-IL-15Rα(T2A)
>Chains 1 and 2: FAP-H6_huIgG1(AAA)_delK-GGS-PLGLAG-GGS-
L_(S162A)-GGGSGGG-SGRSDNQ-GGGSG-R_T2A
(SEQ ID NO: 515)
QVQLVQSGAEVKKPGASVKVSCKASGYTFTENIIHWVRQAPGQGLEWMGWIHPGSGSIKYAQK
LQGRVTMTTDTSTSTAYMELRSLRSDDTAVYYCARHGGTGRGAMDYWGQGTLVTVSSASTKGPSVFPLAPSSKST
SGGTAALGCLVKDYFPEPVTVSWNSGALTSGVHTFPAVLQSSGLYSLSSVVTVPSSSLGTQTYICNVNHKPSNTK
VDKKVEPKSCDKTHTCPPCPAPEAAGGPSVFLFPPKPKDTLMISRTPEVTCVVVDVSHEDPEVKFNWYVDGVEVH
NAKTKPREEQYNSTYRVVSVLTVLHQDWLNGKEYKCKVSNKALAAPIEKTISKAKGQPREPQVYTLPPSRDELTK
NQVSLTCLVKGFYPSDIAVEWESNGQPENNYKTTPPVLDSDGSFFLYSKLTVDKSRWQQGNVFSCSVMHEALHNH
YTQKSLSLSPGGGSPLGLAGGGSNWVNVISDLKKIEDLIQSMHIDATLYTESDVHPSCKVTAMKCFLLELQVISL
ESGDASIHDTVENLIILANNSLSSNGNVTESGCKECEELEEKNIKEFLQSFVHIVQMFINTAGGGSGGGSGRSDN
QGGGSGIACPPPMSVEHADIWVKSYSLYSRERYICNSGFKRKAGTSSLTECVLNKATNVAHWTTPSLKCIRDPAL
VHQRPAPPS
>Chains 3 and 4: FAP-L7-huIgKLC
(SEQ ID NO: 516)
EIVLTQSPGTLSLSPGERATLSCRASQSVSTSAYSYMHWYQQKPGQAPRLLIYLASNLESGIP
DRFSGSGSGTDFTLTISRLEPEDFAVYYCQQSRELPYTEGQGTKLEIKRTVAAPSVFIFPPSDEQLKSGTASVVC
LLNNFYPREAKVQWKVDNALQSGNSQESVTEQDSKDSTYSLSSTLTLSKADYEKHKVYACEVTHQGLSSPVTKSF
NRGEC
P24882158: FAP-H6L7-huIgG1(L234A, L235A, P329A)-delK-GGSPLGLAGGGS-
IL-15(S162A)-GGGSGGGSGRSDNQGGGSGGG-IL-15Rα(T2A)
>Chains 1 and 2: FAP-H6_huIgG1(AAA)_delK-GGS-PLGLAG-GGS-
L_(S162A)-GGGSGGG-SGRSDNQ-GGGSGGG-R_T2A
(SEQ ID NO: 517)
QVQLVQSGAEVKKPGASVKVSCKASGYTFTENIIHWVRQAPGQGLEWMGWIHPGSGSIKYAQK
LQGRVTMTTDTSTSTAYMELRSLRSDDTAVYYCARHGGTGRGAMDYWGQGTLVTVSSASTKGPSVFPLAPSSKST
SGGTAALGCLVKDYFPEPVTVSWNSGALTSGVHTFPAVLQSSGLYSLSSVVTVPSSSLGTQTYICNVNHKPSNTK
VDKKVEPKSCDKTHTCPPCPAPEAAGGPSVFLFPPKPKDTLMISRTPEVTCVVVDVSHEDPEVKFNWYVDGVEVH
NAKTKPREEQYNSTYRVVSVLTVLHQDWLNGKEYKCKVSNKALAAPIEKTISKAKGQPREPQVYTLPPSRDELTK
NQVSLTCLVKGFYPSDIAVEWESNGQPENNYKTTPPVLDSDGSFFLYSKLTVDKSRWQQGNVFSCSVMHEALHNH
YTQKSLSLSPGGGSPLGLAGGGSNWVNVISDLKKIEDLIQSMHIDATLYTESDVHPSCKVTAMKCFLLELQVISL
ESGDASIHDTVENLIILANNSLSSNGNVTESGCKECEELEEKNIKEFLQSFVHIVQMFINTAGGGSGGGSGRSDN
QGGGSGGGIACPPPMSVEHADIWVKSYSLYSRERYICNSGFKRKAGTSSLTECVLNKATNVAHWTTPSLKCIRDP
ALVHQRPAPPS*
>Chains 3 and 4: FAP-L7-huIgKLC
(SEQ ID NO: 518)
EIVLTQSPGTLSLSPGERATLSCRASQSVSTSAYSYMHWYQQKPGQAPRLLIYLASNLESGIP
DRFSGSGSGTDFTLTISRLEPEDFAVYYCQQSRELPYTEGQGTKLEIKRTVAAPSVFIFPPSDEQLKSGTASVVC
LLNNFYPREAKVQWKVDNALQSGNSQESVTEQDSKDSTYSLSSTLTLSKADYEKHKVYACEVTHQGLSSPVTKSF
NRGEC*
P24892158: FAP-H6L7-huIgG1(L234A, L235A, P329A)-delK-GGSPLGLAGGGS-
IL-15(S162A)-GGGSGGGSGRSDNQGGGSGGGSG-IL-15Rα(T2A)
>Chains 1 and 2: FAP-H6_huIgG1(AAA)_delK-GGS-PLGLAG-GGS-
L_(S162A)-GGGSGGG-SGRSDNQ-GGGSGGGSG-R_T2A
(SEQ ID NO: 519)
QVQLVQSGAEVKKPGASVKVSCKASGYTFTENIIHWVRQAPGQGLEWMGWIHPGSGSIKYAQK
LQGRVTMTTDTSTSTAYMELRSLRSDDTAVYYCARHGGTGRGAMDYWGQGTLVTVSSASTKGPSVFPLAPSSKST
SGGTAALGCLVKDYFPEPVTVSWNSGALTSGVHTFPAVLQSSGLYSLSSVVTVPSSSLGTQTYICNVNHKPSNTK
VDKKVEPKSCDKTHTCPPCPAPEAAGGPSVFLFPPKPKDTLMISRTPEVTCVVVDVSHEDPEVKFNWYVDGVEVH
NAKTKPREEQYNSTYRVVSVLTVLHQDWLNGKEYKCKVSNKALAAPIEKTISKAKGQPREPQVYTLPPSRDELTK
NQVSLTCLVKGFYPSDIAVEWESNGQPENNYKTTPPVLDSDGSFFLYSKLTVDKSRWQQGNVFSCSVMHEALHNH
YTQKSLSLSPGGGSPLGLAGGGSNWVNVISDLKKIEDLIQSMHIDATLYTESDVHPSCKVTAMKCFLLELQVISL
ESGDASIHDTVENLIILANNSLSSNGNVTESGCKECEELEEKNIKEFLQSFVHIVQMFINTAGGGSGGGSGRSDN
QGGGSGGGSGIACPPPMSVEHADIWVKSYSLYSRERYICNSGFKRKAGTSSLTECVLNKATNVAHWTTPSLKCIR
DPALVHQRPAPPS*
>Chains 3 and 4: FAP-L7-huIgKLC
(SEQ ID NO: 520)
EIVLTQSPGTLSLSPGERATLSCRASQSVSTSAYSYMHWYQQKPGQAPRLLIYLASNLESGIP
DRFSGSGSGTDFTLTISRLEPEDFAVYYCQQSRELPYTEGQGTKLEIKRTVAAPSVFIFPPSDEQLKSGTASVVC
LLNNFYPREAKVQWKVDNALQSGNSQESVTEQDSKDSTYSLSSTLTLSKADYEKHKVYACEVTHQGLSSPVTKSF
NRGEC*
P24902158: FAP-H6L7-huIgG1(L234A, L235A, P329A)-delK-GGPLGLAGG-IL-
15(S162A)-GGGSGGGSGRSDNQGGGSGGGSG-IL-15Rα(T2A)
>Chains 1 and 2: FAP-H6_huIgG1(AAA)_delK-GG-PLGLAG-G-L_(S162A)-
GGGSGGG-SGRSDNQ-GGGSGGGSG-R_T2A
(SEQ ID NO: 521)
QVQLVQSGAEVKKPGASVKVSCKASGYTFTENIIHWVRQAPGQGLEWMGWIHPGSGSIKYAQK
LQGRVTMTTDTSTSTAYMELRSLRSDDTAVYYCARHGGTGRGAMDYWGQGTLVTVSSASTKGPSVFPLAPSSKST
SGGTAALGCLVKDYFPEPVTVSWNSGALTSGVHTFPAVLQSSGLYSLSSVVTVPSSSLGTQTYICNVNHKPSNTK
VDKKVEPKSCDKTHTCPPCPAPEAAGGPSVFLFPPKPKDTLMISRTPEVTCVVVDVSHEDPEVKFNWYVDGVEVH
NAKTKPREEQYNSTYRVVSVLTVLHQDWLNGKEYKCKVSNKALAAPIEKTISKAKGQPREPQVYTLPPSRDELTK
NQVSLTCLVKGFYPSDIAVEWESNGQPENNYKTTPPVLDSDGSFFLYSKLTVDKSRWQQGNVFSCSVMHEALHNH
YTQKSLSLSPGGGPLGLAGGNWVNVISDLKKIEDLIQSMHIDATLYTESDVHPSCKVTAMKCFLLELQVISLESG
DASIHDTVENLIILANNSLSSNGNVTESGCKECEELEEKNIKEFLQSFVHIVQMFINTAGGGSGGGSGRSDNQGG
GSGGGSGIACPPPMSVEHADIWVKSYSLYSRERYICNSGFKRKAGTSSLTECVLNKATNVAHWTTPSLKCIRDPA
LVHQRPAPPS
>Chains 3 and 4: FAP-L7-huIgKLC
(SEQ ID NO: 522)
EIVLTQSPGTLSLSPGERATLSCRASQSVSTSAYSYMHWYQQKPGQAPRLLIYLASNLESGIP
DRFSGSGSGTDFTLTISRLEPEDFAVYYCQQSRELPYTEGQGTKLEIKRTVAAPSVFIFPPSDEQLKSGTASVVC
LLNNFYPREAKVQWKVDNALQSGNSQESVTEQDSKDSTYSLSSTLTLSKADYEKHKVYACEVTHQGLSSPVTKSF
NRGEC
P24912158: FAP-H6L7-huIgG1(L234A, L235A, P329A)-delK-GGSGGSGGSGGS-
IL-15(S162A)-GGGSGGGSGRSDNQGGGSGGGSG-IL-15Rα (T2A)
>Chains 1 and 2: FAP-H6_huIgG1(AAA)_delK-GGS-GGSGGS-GGS-
L_(S162A)-GGGSGGG-SGRSDNQ-GGGSGGGSG-R_T2A
(SEQ ID NO: 523)
QVQLVQSGAEVKKPGASVKVSCKASGYTFTENIIHWVRQAPGQGLEWMGWIHPGSGSIKYAQK
LQGRVTMTTDTSTSTAYMELRSLRSDDTAVYYCARHGGTGRGAMDYWGQGTLVTVSSASTKGPSVFPLAPSSKST
SGGTAALGCLVKDYFPEPVTVSWNSGALTSGVHTFPAVLQSSGLYSLSSVVTVPSSSLGTQTYICNVNHKPSNTK
VDKKVEPKSCDKTHTCPPCPAPEAAGGPSVFLFPPKPKDTLMISRTPEVTCVVVDVSHEDPEVKFNWYVDGVEVH
NAKTKPREEQYNSTYRVVSVLTVLHQDWLNGKEYKCKVSNKALAAPIEKTISKAKGQPREPQVYTLPPSRDELTK
NQVSLTCLVKGFYPSDIAVEWESNGQPENNYKTTPPVLDSDGSFFLYSKLTVDKSRWQQGNVFSCSVMHEALHNH
YTQKSLSLSPGGGSGGSGGSGGSNWVNVISDLKKIEDLIQSMHIDATLYTESDVHPSCKVTAMKCFLLELQVISL
ESGDASIHDTVENLIILANNSLSSNGNVTESGCKECEELEEKNIKEFLQSFVHIVQMFINTAGGGSGGGSGRSDN
QGGGSGGGSGIACPPPMSVEHADIWVKSYSLYSRERYICNSGFKRKAGTSSLTECVLNKATNVAHWTTPSLKCIR
DPALVHQRPAPPS
>Chains 3 and 4: FAP-L7-huIgKLC
(SEQ ID NO: 524)
EIVLTQSPGTLSLSPGERATLSCRASQSVSTSAYSYMHWYQQKPGQAPRLLIYLASNLESGIP
DRFSGSGSGTDFTLTISRLEPEDFAVYYCQQSRELPYTEGQGTKLEIKRTVAAPSVFIFPPSDEQLKSGTASVVC
LLNNFYPREAKVQWKVDNALQSGNSQESVTEQDSKDSTYSLSSTLTLSKADYEKHKVYACEVTHQGLSSPVTKSF
NRGEC

[0397] Examples of Protease Cleavage Products

[0398] Expected Cleavage Products from uPA/Matriptase Cleavage of P15431450:

1) FAP-H1L1-huIgG1-PLGLAGSGR/SDNR-IL-15(S162A)-
GGSGGSGGSGGSGGS-IL-15Rα/FAP-L1-huIgKLC (product
from complete cleavage)
Chains 1 and 2: FAP-H1L1-huIgG1-PLGLAGSGR
(SEQ ID NO: 525)
EVQLVQSGAEVKKPGESLKISCKGSGYTFTENIIHWVRQMPGKGLEWIGW
FHPGSGSIKYNEKFKDQVTISADKSISTAYLQWSSLKASDTAMYFCARHG
GTGRGAMDYWGQGTLVTVSSASTKGPSVFPLAPSSKSTSGGTAALGCLVK
DYFPEPVTVSWNSGALTSGVHTFPAVLQSSGLYSLSSVVTVPSSSLGTQT
YICNVNHKPSNTKVDKKVEPKSCDKTHTCPPCPAPELLGGPSVFLFPPKP
KDTLMISRTPEVTCVVVDVSHEDPEVKFNWYVDGVEVHNAKTKPREEQYN
STYRVVSVLTVLHQDWLNGKEYKCKVSNKALPAPIEKTISKAKGQPREPQ
VYTLPPSRDELTKNQVSLTCLVKGFYPSDIAVEWESNGQPENNYKTTPPV
LDSDGSFFLYSKLTVDKSRWQQGNVFSCSVMHEALHNHYTQKSLSLSPGK
PLGLAGSGR
Chains 3 and 4: SDNR-IL-15(S162A)-GGSGGSGGSGGSGGS-
IL-15Rα
(SEQ ID NO: 526)
SDNRNWVNVISDLKKIEDLIQSMHIDATLYTESDVHPSCKVTAMKCFLLE
LQVISLESGDASIHDTVENLIILANNSLSSNGNVTESGCKECEELEEKNI
KEFLQSFVHIVQMFINTAGGSGGSGGSGGSGGSITCPPPMSVEHADIWVK
SYSLYSRERYICNSGFKRKAGTSSLTECVLNKATNVAHWTTPSLKCIRDP
ALVHQRPAPPS
Chains 5 and 6: FAP-L1-huIgKLC
(SEQ ID NO: 527)
DIVMTQTPLSLSVTPGQPASISCRASKSVSTSAYSYMHWYLQKPGQSPQL
LIYLASNLESGVPDRFSGSGSGTDFTLKISRVEAEDVGVYYCQHSRELPY
TFGQGTKLEIKRTVAAPSVFIFPPSDEQLKSGTASVVCLLNNFYPREAKV
QWKVDNALQSGNSQESVTEQDSKDSTYSLSSTLTLSKADYEKHKVYACEV
THQGLSSPVTKSFNRGEC
2) FAP-H1L1-huIgG1-PLGLAGSGRSDNR-IL-15(S162A)-
GGSGGSGGSGGSGGS-IL-15Rα/FAP-H1L1-huIgG1-
PLGLAGSGR/SDNR-IL-15(S162A)-GGSGGSGGSGGSGGS-IL-
15Rα/FAP-L1-huIgKLC (product from partial
cleavage, active)
Chain 1: FAP-H1L1-huIgG1-PLGLAGSGRSDNR-IL-
15(S162A)-GGSGGSGGSGGSGGS-IL-15Rα
(SEQ ID NO: 528)
EVQLVQSGAEVKKPGESLKISCKGSGYTFTENIIHWVRQMPGKGLEWIGW
FHPGSGSIKYNEKEKDQVTISADKSISTAYLQWSSLKASDTAMYFCARHG
GTGRGAMDYWGQGTLVTVSSASTKGPSVFPLAPSSKSTSGGTAALGCLVK
DYFPEPVTVSWNSGALTSGVHTFPAVLQSSGLYSLSSVVTVPSSSLGTQT
YICNVNHKPSNTKVDKKVEPKSCDKTHTCPPCPAPELLGGPSVFLFPPKP
KDTLMISRTPEVTCVVVDVSHEDPEVKFNWYVDGVEVHNAKTKPREEQYN
STYRVVSVLTVLHQDWLNGKEYKCKVSNKALPAPIEKTISKAKGQPREPQ
VYTLPPSRDELTKNQVSLTCLVKGFYPSDIAVEWESNGQPENNYKTTPPV
LDSDGSFFLYSKLTVDKSRWQQGNVFSCSVMHEALHNHYTQKSLSLSPGK
PLGLAGSGRSDNRNWVNVISDLKKIEDLIQSMHIDATLYTESDVHPSCKV
TAMKCELLELQVISLESGDASIHDTVENLIILANNSLSSNGNVTESGCKE
CEELEEKNIKEFLQSFVHIVQMFINTAGGSGGSGGSGGSGGSITCPPPMS
VEHADIWVKSYSLYSRERYICNSGFKRKAGTSSLTECVLNKATNVAHWTT
PSLKCIRDPALVHQRPAPPS
Chain 2: FAP-H1L1-huIgG1-PLGLAGSGR
(SEQ ID NO: 529)
EVQLVQSGAEVKKPGESLKISCKGSGYTFTENIIHWVRQMPGKGLEWIGW
FHPGSGSIKYNEKFKDQVTISADKSISTAYLQWSSLKASDTAMYFCARHG
GTGRGAMDYWGQGTLVTVSSASTKGPSVFPLAPSSKSTSGGTAALGCLVK
DYFPEPVTVSWNSGALTSGVHTFPAVLQSSGLYSLSSVVTVPSSSLGTQT
YICNVNHKPSNTKVDKKVEPKSCDKTHTCPPCPAPELLGGPSVFLFPPKP
KDTLMISRTPEVTCVVVDVSHEDPEVKFNWYVDGVEVHNAKTKPREEQYN
STYRVVSVLTVLHQDWLNGKEYKCKVSNKALPAPIEKTISKAKGQPREPQ
VYTLPPSRDELTKNQVSLTCLVKGFYPSDIAVEWESNGQPENNYKTTPPV
LDSDGSFFLYSKLTVDKSRWQQGNVFSCSVMHEALHNHYTQKSLSLSPGK
PLGLAGSGR
Chain 3: SDNR-IL-15(S162A)-GGSGGSGGSGGSGGS-IL-15Rα
(SEQ ID NO: 530)
SDNRNWVNVISDLKKIEDLIQSMHIDATLYTESDVHPSCKVTAMKCFLLE
LQVISLESGDASIHDTVENLIILANNSLSSNGNVTESGCKECEELEEKNI
KEFLQSFVHIVQMFINTAGGSGGSGGSGGSGGSITCPPPMSVEHADIWVK
SYSLYSRERYICNSGFKRKAGTSSLTECVLNKATNVAHWTTPSLKCIRDP
ALVHQRPAPPS*
Chain 4 and 5: FAP-L1-huIgKLC
(SEQ ID NO: 531)
DIVMTQTPLSLSVTPGQPASISCRASKSVSTSAYSYMHWYLQKPGQSPQL
LIYLASNLESGVPDRFSGSGSGTDFTLKISRVEAEDVGVYYCQHSRELPY
TFGQGTKLEIKRTVAAPSVFIFPPSDEQLKSGTASVVCLLNNFYPREAKV
QWKVDNALQSGNSQESVTEQDSKDSTYSLSSTLTLSKADYEKHKVYACEV
THQGLSSPVTKSFNRGEC

[0399] Expected Cleavage Products from MMP-2/MMP-9 Cleavage of P15431450:

1) FAP-H1L1-huIgG1-PLG/LAGSGRSDNR-IL-15(S162A)-
GGSGGSGGSGGSGGS-IL-15Rα/FAP-L1-huIgKLC (product
from complete cleavage)
Chains 1 and 2: FAP-H1L1-huIgG1-PLG
(SEQ ID NO: 532)
EVQLVQSGAEVKKPGESLKISCKGSGYTFTENIIHWVRQMPGKGLEWIGW
FHPGSGSIKYNEKFKDQVTISADKSISTAYLQWSSLKASDTAMYFCARHG
GTGRGAMDYWGQGTLVTVSSASTKGPSVFPLAPSSKSTSGGTAALGCLVK
DYFPEPVTVSWNSGALTSGVHTFPAVLQSSGLYSLSSVVTVPSSSLGTQT
YICNVNHKPSNTKVDKKVEPKSCDKTHTCPPCPAPELLGGPSVFLFPPKP
KDTLMISRTPEVTCVVVDVSHEDPEVKFNWYVDGVEVHNAKTKPREEQYN
STYRVVSVLTVLHQDWLNGKEYKCKVSNKALPAPIEKTISKAKGQPREPQ
VYTLPPSRDELTKNQVSLTCLVKGFYPSDIAVEWESNGQPENNYKTTPPV
LDSDGSFFLYSKLTVDKSRWQQGNVFSCSVMHEALHNHYTQKSLSLSPGK
PLG
Chains 3 and 4: LAGSGRSDNR-IL-15(S162A)-
GGSGGSGGSGGSGGS-IL-15Rα
(SEQ ID NO: 533)
LAGSGRSDNRNWVNVISDLKKIEDLIQSMHIDATLYTESDVHPSCKVTAM
KCFLLELQVISLESGDASIHDTVENLIILANNSLSSNGNVTESGCKECEE
LEEKNIKEFLQSFVHIVQMFINTAGGSGGSGGSGGSGGSITCPPPMSVEH
ADIWVKSYSLYSRERYICNSGFKRKAGTSSLTECVLNKATNVAHWTTPSL
KCIRDPALVHQRPAPPS
Chains 5 and 6: FAP-L1-huIgKLC
(SEQ ID NO: 534)
DIVMTQTPLSLSVTPGQPASISCRASKSVSTSAYSYMHWYLQKPGQSPQL
LIYLASNLESGVPDRFSGSGSGTDFTLKISRVEAEDVGVYYCQHSRELPY
TFGQGTKLEIKRTVAAPSVFIFPPSDEQLKSGTASVVCLLNNFYPREAKV
QWKVDNALQSGNSQESVTEQDSKDSTYSLSSTLTLSKADYEKHKVYACEV
THQGLSSPVTKSFNRGEC
2) FAP-H1L1-huIgG1-PLGLAGSGRSDNR-IL-15(S162A)-
GGSGGSGGSGGSGGS-IL-15Rα/FAP-H1L1-huIgG1-PLG/
LAGSGRSDNR-IL-15(S162A)-GGSGGSGGSGGSGGS-IL-
15Rα/FAP-L1-huIgKLC (product from partial
cleavage, active)
Chain 1: FAP-H1L1-huIgG1-PLGLAGSGRSDNR-IL-
15(S162A)-GGSGGSGGSGGSGGS-IL-15Rα
(SEQ ID NO: 535)
EVQLVQSGAEVKKPGESLKISCKGSGYTFTENIIHWVRQMPGKGLEWIGW
FHPGSGSIKYNEKEKDQVTISADKSISTAYLQWSSLKASDTAMYFCARHG
GTGRGAMDYWGQGTLVTVSSASTKGPSVFPLAPSSKSTSGGTAALGCLVK
DYFPEPVTVSWNSGALTSGVHTFPAVLQSSGLYSLSSVVTVPSSSLGTQT
YICNVNHKPSNTKVDKKVEPKSCDKTHTCPPCPAPELLGGPSVFLFPPKP
KDTLMISRTPEVTCVVVDVSHEDPEVKFNWYVDGVEVHNAKTKPREEQYN
STYRVVSVLTVLHQDWLNGKEYKCKVSNKALPAPIEKTISKAKGQPREPQ
VYTLPPSRDELTKNQVSLTCLVKGFYPSDIAVEWESNGQPENNYKTTPPV
LDSDGSFFLYSKLTVDKSRWQQGNVFSCSVMHEALHNHYTQKSLSLSPGK
PLGLAGSGRSDNRNWVNVISDLKKIEDLIQSMHIDATLYTESDVHPSCKV
TAMKCELLELQVISLESGDASIHDTVENLIILANNSLSSNGNVTESGCKE
CEELEEKNIKEFLQSFVHIVQMFINTAGGSGGSGGSGGSGGSITCPPPMS
VEHADIWVKSYSLYSRERYICNSGFKRKAGTSSLTECVLNKATNVAHWTT
PSLKCIRDPALVHQRPAPPS
Chain 2: FAP-H1L1-huIgG1-PLG
(SEQ ID NO: 536)
EVQLVQSGAEVKKPGESLKISCKGSGYTFTENIIHWVRQMPGKGLEWIGW
FHPGSGSIKYNEKFKDQVTISADKSISTAYLQWSSLKASDTAMYFCARHG
GTGRGAMDYWGQGTLVTVSSASTKGPSVFPLAPSSKSTSGGTAALGCLVK
DYFPEPVTVSWNSGALTSGVHTFPAVLQSSGLYSLSSVVTVPSSSLGTQT
YICNVNHKPSNTKVDKKVEPKSCDKTHTCPPCPAPELLGGPSVFLFPPKP
KDTLMISRTPEVTCVVVDVSHEDPEVKFNWYVDGVEVHNAKTKPREEQYN
STYRVVSVLTVLHQDWLNGKEYKCKVSNKALPAPIEKTISKAKGQPREPQ
VYTLPPSRDELTKNQVSLTCLVKGFYPSDIAVEWESNGQPENNYKTTPPV
LDSDGSFFLYSKLTVDKSRWQQGNVFSCSVMHEALHNHYTQKSLSLSPGK
PLG
Chain 3: LAGSGRSDNR-IL-15(S162A)-GGSGGSGGSGGSGGS-
IL-15Rα
(SEQ ID NO: 537)
LAGSGRSDNRNWVNVISDLKKIEDLIQSMHIDATLYTESDVHPSCKVTAM
KCFLLELQVISLESGDASIHDTVENLIILANNSLSSNGNVTESGCKECEE
LEEKNIKEFLQSFVHIVQMFINTAGGSGGSGGSGGSGGSITCPPPMSVEH
ADIWVKSYSLYSRERYICNSGFKRKAGTSSLTECVLNKATNVAHWTTPSL
KCIRDPALVHQRPAPPS
Chain 4 and 5: FAP-L1-huIgKLC
(SEQ ID NO: 538)
DIVMTQTPLSLSVTPGQPASISCRASKSVSTSAYSYMHWYLQKPGQSPQL
LIYLASNLESGVPDRFSGSGSGTDFTLKISRVEAEDVGVYYCQHSRELPY
TFGQGTKLEIKRTVAAPSVFIFPPSDEQLKSGTASVVCLLNNFYPREAKV
QWKVDNALQSGNSQESVTEQDSKDSTYSLSSTLTLSKADYEKHKVYACEV
THQGLSSPVTKSFNRGEC

[0400] Expected Cleavage Products from uPA/Matriptase Cleavage of P18121450:

1) FAP-H1-huIgG1(AAA) delK-GG-L (S162A)-
GGSGGSPLGLAGSGR/SDNQGGSGGA-IL-15Rα(T2A)/FAP-L1-
huIgKLC (product from complete cleavage)
Chains 1 and 2: FAP-H1-huIgG1(AAA)_delK-GG-
L_(S162A)-GGSGGSPLGLAGSGR
(SEQ ID NO: 539)
EVQLVQSGAEVKKPGESLKISCKGSGYTFTENIIHWVRQMPGKGLEWIGW
FHPGSGSIKYNEKFKDQVTISADKSISTAYLQWSSLKASDTAMYFCARHG
GTGRGAMDYWGQGTLVTVSSASTKGPSVFPLAPSSKSTSGGTAALGCLVK
DYFPEPVTVSWNSGALTSGVHTFPAVLQSSGLYSLSSVVTVPSSSLGTQT
YICNVNHKPSNTKVDKKVEPKSCDKTHTCPPCPAPEAAGGPSVFLFPPKP
KDTLMISRTPEVTCVVVDVSHEDPEVKFNWYVDGVEVHNAKTKPREEQYN
STYRVVSVLTVLHQDWLNGKEYKCKVSNKALAAPIEKTISKAKGQPREPQ
VYTLPPSRDELTKNQVSLTCLVKGFYPSDIAVEWESNGQPENNYKTTPPV
LDSDGSFFLYSKLTVDKSRWQQGNVFSCSVMHEALHNHYTQKSLSLSPGG
GNWVNVISDLKKIEDLIQSMHIDATLYTESDVHPSCKVTAMKCFLLELQV
ISLESGDASIHDTVENLIILANNSLSSNGNVTESGCKECEELEEKNIKEF
LQSFVHIVQMFINTAGGSGGSPLGLAGSGR
Chains 3 and 4: SDNQGGSGGA-IL-15Rα(T2A)
(SEQ ID NO: 540)
SDNQGGSGGAIACPPPMSVEHADIWVKSYSLYSRERYICNSGFKRKAGTS
SLTECVLNKATNVAHWTTPSLKCIRDPALVHQRPAPPS
Chains 5 and 6: FAP-L1-huIgKLC
(SEQ ID NO: 541)
DIVMTQTPLSLSVTPGQPASISCRASKSVSTSAYSYMHWYLQKPGQSPQL
LIYLASNLESGVPDRFSGSGSGTDFTLKISRVEAEDVGVYYCQHSRELPY
TFGQGTKLEIKRTVAAPSVFIFPPSDEQLKSGTASVVCLLNNFYPREAKV
QWKVDNALQSGNSQESVTEQDSKDSTYSLSSTLTLSKADYEKHKVYACEV
THQGLSSPVTKSFNRGEC
2) FAP-H1-huIgG1(AAA) delK-GG-L (S162A)-
GGSGGSPLGLAGSGRSDNQGGSGGA-IL-15Rα(T2A)/FAP-H1-
huIgG1(AAA) delK-GG-L (S162A)-GGSGGSPLGLAGSGR/
SDNQGGSGGA-IL-15Rα(T2A)/FAP-L1-huIgKLC (product
from partial cleavage, active)
Chain 1: FAP-H1-huIgG1(AAA)_delK-GG-L_(S162A)-
GGSGGSPLGLAGSGRSDNQGGSGGA-IL-15Rα(T2A)
(SEQ ID NO: 542)
EVQLVQSGAEVKKPGESLKISCKGSGYTFTENIIHWVRQMPGKGLEWIGW
FHPGSGSIKYNEKFKDQVTISADKSISTAYLQWSSLKASDTAMYFCARHG
GTGRGAMDYWGQGTLVTVSSASTKGPSVFPLAPSSKSTSGGTAALGCLVK
DYFPEPVTVSWNSGALTSGVHTFPAVLQSSGLYSLSSVVTVPSSSLGTQT
YICNVNHKPSNTKVDKKVEPKSCDKTHTCPPCPAPEAAGGPSVFLFPPKP
KDTLMISRTPEVTCVVVDVSHEDPEVKFNWYVDGVEVHNAKTKPREEQYN
STYRVVSVLTVLHQDWLNGKEYKCKVSNKALAAPIEKTISKAKGQPREPQ
VYTLPPSRDELTKNQVSLTCLVKGFYPSDIAVEWESNGQPENNYKTTPPV
LDSDGSFFLYSKLTVDKSRWQQGNVFSCSVMHEALHNHYTQKSLSLSPGG
GNWVNVISDLKKIEDLIQSMHIDATLYTESDVHPSCKVTAMKCFLLELQV
ISLESGDASIHDTVENLIILANNSLSSNGNVTESGCKECEELEEKNIKEF
LQSFVHIVQMFINTAGGSGGSPLGLAGSGRSDNQGGSGGAIACPPPMSVE
HADIWVKSYSLYSRERYICNSGFKRKAGTSSLTECVLNKATNVAHWTTPS
LKCIRDPALVHQRPAPPS
Chain 2: FAP-H1-huIgG1(AAA)_delK-GG-L_(S162A)-
GGSGGSPLGLAGSGR
(SEQ ID NO: 543)
EVQLVQSGAEVKKPGESLKISCKGSGYTFTENIIHWVRQMPGKGLEWIGW
FHPGSGSIKYNEKFKDQVTISADKSISTAYLQWSSLKASDTAMYFCARHG
GTGRGAMDYWGQGTLVTVSSASTKGPSVFPLAPSSKSTSGGTAALGCLVK
DYFPEPVTVSWNSGALTSGVHTFPAVLQSSGLYSLSSVVTVPSSSLGTQT
YICNVNHKPSNTKVDKKVEPKSCDKTHTCPPCPAPEAAGGPSVFLFPPKP
KDTLMISRTPEVTCVVVDVSHEDPEVKFNWYVDGVEVHNAKTKPREEQYN
STYRVVSVLTVLHQDWLNGKEYKCKVSNKALAAPIEKTISKAKGQPREPQ
VYTLPPSRDELTKNQVSLTCLVKGFYPSDIAVEWESNGQPENNYKTTPPV
LDSDGSFFLYSKLTVDKSRWQQGNVFSCSVMHEALHNHYTQKSLSLSPGG
GNWVNVISDLKKIEDLIQSMHIDATLYTESDVHPSCKVTAMKCFLLELQV
ISLESGDASIHDTVENLIILANNSLSSNGNVTESGCKECEELEEKNIKEF
LQSFVHIVQMFINTAGGSGGSPLGLAGSGR
Chain 3: SDNQGGSGGA-IL-15Rα(T2A)
(SEQ ID NO: 544)
SDNQGGSGGAIACPPPMSVEHADIWVKSYSLYSRERYICNSGFKRKAGTS
SLTECVLNKATNVAHWTTPSLKCIRDPALVHQRPAPPS
Chain 4 and 5: FAP-L1-huIgKLC
(SEQ ID NO: 545)
DIVMTQTPLSLSVTPGQPASISCRASKSVSTSAYSYMHWYLQKPGQSPQL
LIYLASNLESGVPDRFSGSGSGTDFTLKISRVEAEDVGVYYCQHSRELPY
TFGQGTKLEIKRTVAAPSVFIFPPSDEQLKSGTASVVCLLNNFYPREAKV
QWKVDNALQSGNSQESVTEQDSKDSTYSLSSTLTLSKADYEKHKVYACEV
THQGLSSPVTKSFNRGEC

[0401] Expected Cleavage Products from MMP-2/MMP-9 Cleavage of P18121450:

1) FAP-H1-huIgG1(AAA) delK-GG-L (S162A)-
GGSGGSPLG/LAGSGRSDNQGGSGGA-IL-15Rα(T2A)/FAP-L1-
huIgKLC (product from complete cleavage)
Chains 1 and 2: FAP-H1-huIgG1(AAA)_delK-GG-
L_(S162A)-GGSGGSP LG
(SEQ ID NO: 546)
EVQLVQSGAEVKKPGESLKISCKGSGYTFTENIIHWVRQMPGKGLEWIGW
FHPGSGSIKYNEKFKDQVTISADKSISTAYLQWSSLKASDTAMYFCARHG
GTGRGAMDYWGQGTLVTVSSASTKGPSVFPLAPSSKSTSGGTAALGCLVK
DYFPEPVTVSWNSGALTSGVHTFPAVLQSSGLYSLSSVVTVPSSSLGTQT
YICNVNHKPSNTKVDKKVEPKSCDKTHTCPPCPAPEAAGGPSVFLFPPKP
KDTLMISRTPEVTCVVVDVSHEDPEVKFNWYVDGVEVHNAKTKPREEQYN
STYRVVSVLTVLHQDWLNGKEYKCKVSNKALAAPIEKTISKAKGQPREPQ
VYTLPPSRDELTKNQVSLTCLVKGFYPSDIAVEWESNGQPENNYKTTPPV
LDSDGSFFLYSKLTVDKSRWQQGNVFSCSVMHEALHNHYTQKSLSLSPGG
GNWVNVISDLKKIEDLIQSMHIDATLYTESDVHPSCKVTAMKCFLLELQV
ISLESGDASIHDTVENLIILANNSLSSNGNVTESGCKECEELEEKNIKEF
LQSFVHIVQMFINTAGGSGGSPLG
Chains 3 and 4: LAGSGRSDNQGGSGGA-IL-15Rα(T2A)
(SEQ ID NO: 547)
LAGSGRSDNQGGSGGAIACPPPMSVEHADIWVKSYSLYSRERYICNSGFK
RKAGTSSLTECVLNKATNVAHWTTPSLKCIRDPALVHQRPAPPS
Chains 5 and 6: FAP-L1-huIgKLC
(SEQ ID NO: 548)
DIVMTQTPLSLSVTPGQPASISCRASKSVSTSAYSYMHWYLQKPGQSPQL
LIYLASNLESGVPDRFSGSGSGTDFTLKISRVEAEDVGVYYCQHSRELPY
TFGQGTKLEIKRTVAAPSVFIFPPSDEQLKSGTASVVCLLNNFYPREAKV
QWKVDNALQSGNSQESVTEQDSKDSTYSLSSTLTLSKADYEKHKVYACEV
THQGLSSPVTKSFNRGEC
2) FAP-H1-huIgG1(AAA) delK-GG-L (S162A)-
GGSGGSPLGLAGSGRSDNQGGSGGA-IL-15Rα(T2A)/FAP-H1-
huIgG1(AAA) delK-GG-L (S162A)-GGSGGSPLG/
LAGSGRSDNQGGSGGA-IL-15Rα(T2A)/FAP-L1-huIgKLC
(product from partial cleavage, active)
Chain 1: FAP-H1-huIgG1(AAA)_delK-GG-L_(S162A)-
GGSGGSPLGLAGSGRSDNQGGSGGA-IL-15Rα(T2A)
(SEQ ID NO: 549)
EVQLVQSGAEVKKPGESLKISCKGSGYTFTENIIHWVRQMPGKGLEWIGW
FHPGSGSIKYNEKFKDQVTISADKSISTAYLQWSSLKASDTAMYFCARHG
GTGRGAMDYWGQGTLVTVSSASTKGPSVFPLAPSSKSTSGGTAALGCLVK
DYFPEPVTVSWNSGALTSGVHTFPAVLQSSGLYSLSSVVTVPSSSLGTQT
YICNVNHKPSNTKVDKKVEPKSCDKTHTCPPCPAPEAAGGPSVFLFPPKP
KDTLMISRTPEVTCVVVDVSHEDPEVKFNWYVDGVEVHNAKTKPREEQYN
STYRVVSVLTVLHQDWLNGKEYKCKVSNKALAAPIEKTISKAKGQPREPQ
VYTLPPSRDELTKNQVSLTCLVKGFYPSDIAVEWESNGQPENNYKTTPPV
LDSDGSFFLYSKLTVDKSRWQQGNVFSCSVMHEALHNHYTQKSLSLSPGG
GNWVNVISDLKKIEDLIQSMHIDATLYTESDVHPSCKVTAMKCFLLELQV
ISLESGDASIHDTVENLIILANNSLSSNGNVTESGCKECEELEEKNIKEF
LQSFVHIVQMFINTAGGSGGSPLGLAGSGRSDNQGGSGGAIACPPPMSVE
HADIWVKSYSLYSRERYICNSGFKRKAGTSSLTECVLNKATNVAHWTTPS
LKCIRDPALVHQRPAPPS
Chain 2: FAP-H1-huIgG1(AAA)_delK-GG-L_(S162A)-
GGSGGSPLG
(SEQ ID NO: 550)
EVQLVQSGAEVKKPGESLKISCKGSGYTFTENIIHWVRQMPGKGLEWIGW
FHPGSGSIKYNEKFKDQVTISADKSISTAYLQWSSLKASDTAMYFCARHG
GTGRGAMDYWGQGTLVTVSSASTKGPSVFPLAPSSKSTSGGTAALGCLVK
DYFPEPVTVSWNSGALTSGVHTFPAVLQSSGLYSLSSVVTVPSSSLGTQT
YICNVNHKPSNTKVDKKVEPKSCDKTHTCPPCPAPEAAGGPSVFLFPPKP
KDTLMISRTPEVTCVVVDVSHEDPEVKFNWYVDGVEVHNAKTKPREEQYN
STYRVVSVLTVLHQDWLNGKEYKCKVSNKALAAPIEKTISKAKGQPREPQ
VYTLPPSRDELTKNQVSLTCLVKGFYPSDIAVEWESNGQPENNYKTTPPV
LDSDGSFFLYSKLTVDKSRWQQGNVFSCSVMHEALHNHYTQKSLSLSPGG
GNWVNVISDLKKIEDLIQSMHIDATLYTESDVHPSCKVTAMKCFLLELQV
ISLESGDASIHDTVENLIILANNSLSSNGNVTESGCKECEELEEKNIKEF
LQSFVHIVQMFINTAGGSGGSPLG
Chain 3: LAGSGRSDNQGGSGGA-IL-15Rα(T2A)
(SEQ ID NO: 551)
LAGSGRSDNQGGSGGAIACPPPMSVEHADIWVKSYSLYSRERYICNSGFK
RKAGTSSLTECVLNKATNVAHWTTPSLKCIRDPALVHQRPAPPS
Chain 4 and 5: FAP-L1-huIgKLC
(SEQ ID NO: 552)
DIVMTQTPLSLSVTPGQPASISCRASKSVSTSAYSYMHWYLQKPGQSPQL
LIYLASNLESGVPDRFSGSGSGTDFTLKISRVEAEDVGVYYCQHSRELPY
TFGQGTKLEIKRTVAAPSVFIFPPSDEQLKSGTASVVCLLNNFYPREAKV
QWKVDNALQSGNSQESVTEQDSKDSTYSLSSTLTLSKADYEKHKVYACEV
THQGLSSPVTKSFNRGEC

[0402] Expected Cleavage Products from uPA/Matriptase Cleavage of P24872158:

1) FAP-H6L7-huIgG1(L234A, L235A, P329A)-delK-
GGSPLGLAGGGS-IL-15(S162A)-GGGSGGGSGR/SDNQGGGSG-IL-
15Rα(T2A)/FAP-L7-huIgKLC (product from complete
cleavage)
Chains 1 and 2: FAP-H6L7-huIgG1(L234A, L235A,
P329A)-delK-GGSPLGLAGGGS-IL-15(S162A)-GGGSGGGSGR
(SEQ ID NO: 553)
QVQLVQSGAEVKKPGASVKVSCKASGYTFTENIIHWVRQAPGQGLEWMGW
IHPGSGSIKYAQKLQGRVTMTTDTSTSTAYMELRSLRSDDTAVYYCARHG
GTGRGAMDYWGQGTLVTVSSASTKGPSVFPLAPSSKSTSGGTAALGCLVK
DYFPEPVTVSWNSGALTSGVHTFPAVLQSSGLYSLSSVVTVPSSSLGTQT
YICNVNHKPSNTKVDKKVEPKSCDKTHTCPPCPAPEAAGGPSVFLFPPKP
KDTLMISRTPEVTCVVVDVSHEDPEVKFNWYVDGVEVHNAKTKPREEQYN
STYRVVSVLTVLHQDWLNGKEYKCKVSNKALAAPIEKTISKAKGQPREPQ
VYTLPPSRDELTKNQVSLTCLVKGFYPSDIAVEWESNGQPENNYKTTPPV
LDSDGSFFLYSKLTVDKSRWQQGNVFSCSVMHEALHNHYTQKSLSLSPGG
GSPLGLAGGGSNWVNVISDLKKIEDLIQSMHIDATLYTESDVHPSCKVTA
MKCFLLELQVISLESGDASIHDTVENLIILANNSLSSNGNVTESGCKECE
ELEEKNIKEFLQSFVHIVQMFINTAGGGSGGGSGR
Chains 3 and 4: SDNQGGGSG-IL-15Rα(T2A)
(SEQ ID NO: 554)
SDNQGGGSGIACPPPMSVEHADIWVKSYSLYSRERYICNSGFKRKAGTSS
LTECVLNKATNVAHWTTPSLKCIRDPALVHQRPAPPS
Chains 5 and 6: FAP-L7-huIgKLC
(SEQ ID NO: 555)
EIVLTQSPGTLSLSPGERATLSCRASQSVSTSAYSYMHWYQQKPGQAPRL
LIYLASNLESGIPDRFSGSGSGTDFTLTISRLEPEDFAVYYCQQSRELPY
TEGQGTKLEIKRTVAAPSVFIFPPSDEQLKSGTASVVCLLNNFYPREAKV
QWKVDNALQSGNSQESVTEQDSKDSTYSLSSTLTLSKADYEKHKVYACEV
THQGLSSPVTKSFNRGEC
2) FAP-H6L7-huIgG1(L234A, L235A, P329A)-delK-
GGSPLGLAGGGS-IL-15(S162A)-GGGSGGGSGRSDNQGGGSG-IL-
15Rα(T2A)/FAP-H6L7-huIgG1(L234A, L235A, P329A)-
delK-GGSPLGLAGGGS-IL-15(S162A)-GGGSGGGSGR/
SDNQGGGSG-IL-15Rα(T2A)/FAP-L7-huIgKLC (product
from partial cleavage, active)
Chain 1: FAP-H6L7-huIgG1(L234A, L235A, P329A)-
delK-GGSPLGLAGGGS-IL-15(S162A)-
GGGSGGGSGRSDNQGGGSG-IL-15Rα(T2A)
(SEQ ID NO: 556)
QVQLVQSGAEVKKPGASVKVSCKASGYTFTENIIHWVRQAPGQGLEWMGW
IHPGSGSIKYAQKLQGRVTMTTDTSTSTAYMELRSLRSDDTAVYYCARHG
GTGRGAMDYWGQGTLVTVSSASTKGPSVFPLAPSSKSTSGGTAALGCLVK
DYFPEPVTVSWNSGALTSGVHTFPAVLQSSGLYSLSSVVTVPSSSLGTQT
YICNVNHKPSNTKVDKKVEPKSCDKTHTCPPCPAPEAAGGPSVFLFPPKP
KDTLMISRTPEVTCVVVDVSHEDPEVKFNWYVDGVEVHNAKTKPREEQYN
STYRVVSVLTVLHQDWLNGKEYKCKVSNKALAAPIEKTISKAKGQPREPQ
VYTLPPSRDELTKNQVSLTCLVKGFYPSDIAVEWESNGQPENNYKTTPPV
LDSDGSFFLYSKLTVDKSRWQQGNVFSCSVMHEALHNHYTQKSLSLSPGG
GSPLGLAGGGSNWVNVISDLKKIEDLIQSMHIDATLYTESDVHPSCKVTA
MKCFLLELQVISLESGDASIHDTVENLIILANNSLSSNGNVTESGCKECE
ELEEKNIKEFLQSFVHIVQMFINTAGGGSGGGSGRSDNQGGGSGIACPPP
MSVEHADIWVKSYSLYSRERYICNSGFKRKAGTSSLTECVLNKATNVAHW
TTPSLKCIRDPALVHQRPAPPS
Chain 2: FAP-H6L7-huIgG1(L234A, L235A, P329A)-
delK-GGSPLGLAGGGS-IL-15(S162A)-GGGSGGGSGR
(SEQ ID NO: 557)
QVQLVQSGAEVKKPGASVKVSCKASGYTFTENIIHWVRQAPGQGLEWMGW
IHPGSGSIKYAQKLQGRVTMTTDTSTSTAYMELRSLRSDDTAVYYCARHG
GTGRGAMDYWGQGTLVTVSSASTKGPSVFPLAPSSKSTSGGTAALGCLVK
DYFPEPVTVSWNSGALTSGVHTFPAVLQSSGLYSLSSVVTVPSSSLGTQT
YICNVNHKPSNTKVDKKVEPKSCDKTHTCPPCPAPEAAGGPSVFLFPPKP
KDTLMISRTPEVTCVVVDVSHEDPEVKFNWYVDGVEVHNAKTKPREEQYN
STYRVVSVLTVLHQDWLNGKEYKCKVSNKALAAPIEKTISKAKGQPREPQ
VYTLPPSRDELTKNQVSLTCLVKGFYPSDIAVEWESNGQPENNYKTTPPV
LDSDGSFFLYSKLTVDKSRWQQGNVFSCSVMHEALHNHYTQKSLSLSPGG
GSPLGLAGGGSNWVNVISDLKKIEDLIQSMHIDATLYTESDVHPSCKVTA
MKCFLLELQVISLESGDASIHDTVENLIILANNSLSSNGNVTESGCKECE
ELEEKNIKEFLQSFVHIVQMFINTAGGGSGGGSGR
Chain 3: SDNQGGGSG-IL-15Rα(T2A)
(SEQ ID NO: 558)
SDNQGGGSGIACPPPMSVEHADIWVKSYSLYSRERYICNSGFKRKAGTSS
LTECVLNKATNVAHWTTPSLKCIRDPALVHQRPAPPS
Chain 4 and 5: FAP-L7-huIgKLC
(SEQ ID NO: 559)
EIVLTQSPGTLSLSPGERATLSCRASQSVSTSAYSYMHWYQQKPGQAPRL
LIYLASNLESGIPDRFSGSGSGTDFTLTISRLEPEDFAVYYCQQSRELPY
TEGQGTKLEIKRTVAAPSVFIFPPSDEQLKSGTASVVCLLNNFYPREAKV
QWKVDNALQSGNSQESVTEQDSKDSTYSLSSTLTLSKADYEKHKVYACEV
THQGLSSPVTKSFNRGEC

[0403] Expected Cleavage Products from MMP-2/MMP-9 Cleavage of P24872158:

1) FAP-H6L7-huIgG1(L234A, L235A, P329A)-delK-
GGSPLG/LAGGGS-IL-15(S162A)-GGGSGGGSGRSDNQGGGSG-IL-
15Rα(T2A)/FAP-L7-huIgKLC (product from complete
cleavage)
Chains 1 and 2: FAP-H6L7-huIgG1(L234A, L235A,
P329A)-delK-GGSPLG
(SEQ ID NO: 560)
QVQLVQSGAEVKKPGASVKVSCKASGYTFTENIIHWVRQAPGQGLEWMGW
IHPGSGSIKYAQKLQGRVTMTTDTSTSTAYMELRSLRSDDTAVYYCARHG
GTGRGAMDYWGQGTLVTVSSASTKGPSVFPLAPSSKSTSGGTAALGCLVK
DYFPEPVTVSWNSGALTSGVHTFPAVLQSSGLYSLSSVVTVPSSSLGTQT
YICNVNHKPSNTKVDKKVEPKSCDKTHTCPPCPAPEAAGGPSVFLFPPKP
KDTLMISRTPEVTCVVVDVSHEDPEVKFNWYVDGVEVHNAKTKPREEQYN
STYRVVSVLTVLHQDWLNGKEYKCKVSNKALAAPIEKTISKAKGQPREPQ
VYTLPPSRDELTKNQVSLTCLVKGFYPSDIAVEWESNGQPENNYKTTPPV
LDSDGSFFLYSKLTVDKSRWQQGNVFSCSVMHEALHNHYTQKSLSLSPGG
GSPLG
Chains 3 and 4: LAGGGS-IL-15(S162A)-
GGGSGGGSGRSDNQGGGSG-IL-15Rα(T2A)
(SEQ ID NO: 561)
LAGGGSNWVNVISDLKKIEDLIQSMHIDATLYTESDVHPSCKVTAMKCFL
LELQVISLESGDASIHDTVENLIILANNSLSSNGNVTESGCKECEELEEK
NIKEFLQSFVHIVQMFINTAGGGSGGGSGRSDNQGGGSGIACPPPMSVEH
ADIWVKSYSLYSRERYICNSGFKRKAGTSSLTECVLNKATNVAHWTTPSL
KCIRDPALVHQRPAPPS
Chains 5 and 6: FAP-L7-huIgKLC
(SEQ ID NO: 562)
EIVLTQSPGTLSLSPGERATLSCRASQSVSTSAYSYMHWYQQKPGQAPRL
LIYLASNLESGIPDRFSGSGSGTDFTLTISRLEPEDFAVYYCQQSRELPY
TEGQGTKLEIKRTVAAPSVFIFPPSDEQLKSGTASVVCLLNNFYPREAKV
QWKVDNALQSGNSQESVTEQDSKDSTYSLSSTLTLSKADYEKHKVYACEV
THQGLSSPVTKSFNRGEC
2) FAP-H6L7-huIgG1(L234A, L235A, P329A)-delK-
GGSPLGLAGGGS-IL-15(S162A)-GGGSGGGSGRSDNQGGGSG-IL-
15Rα(T2A)/FAP-H6L7-huIgG1(L234A, L235A, P329A)-
delK-GGSPLG/LAGGGS-IL-15(S162A)-
GGGSGGGSGRSDNQGGGSG-IL-15Rα(T2A)/FAP-L7-huIgKLC
(product from partial cleavage, active)
Chain 1: FAP-H6L7-huIgG1(L234A, L235A, P329A)-
delK-GGSPLGLAGGGS-IL-15(S162A)-
GGGSGGGSGRSDNQGGGSG-IL-15Rα(T2A)
(SEQ ID NO: 563)
QVQLVQSGAEVKKPGASVKVSCKASGYTFTENIIHWVRQAPGQGLEWMGW
IHPGSGSIKYAQKLQGRVTMTTDTSTSTAYMELRSLRSDDTAVYYCARHG
GTGRGAMDYWGQGTLVTVSSASTKGPSVFPLAPSSKSTSGGTAALGCLVK
DYFPEPVTVSWNSGALTSGVHTFPAVLQSSGLYSLSSVVTVPSSSLGTQT
YICNVNHKPSNTKVDKKVEPKSCDKTHTCPPCPAPEAAGGPSVFLFPPKP
KDTLMISRTPEVTCVVVDVSHEDPEVKFNWYVDGVEVHNAKTKPREEQYN
STYRVVSVLTVLHQDWLNGKEYKCKVSNKALAAPIEKTISKAKGQPREPQ
VYTLPPSRDELTKNQVSLTCLVKGFYPSDIAVEWESNGQPENNYKTTPPV
LDSDGSFFLYSKLTVDKSRWQQGNVFSCSVMHEALHNHYTQKSLSLSPGG
GSPLGLAGGGSNWVNVISDLKKIEDLIQSMHIDATLYTESDVHPSCKVTA
MKCFLLELQVISLESGDASIHDTVENLIILANNSLSSNGNVTESGCKECE
ELEEKNIKEFLQSFVHIVQMFINTAGGGSGGGSGRSDNQGGGSGIACPPP
MSVEHADIWVKSYSLYSRERYICNSGFKRKAGTSSLTECVLNKATNVAHW
TTPSLKCIRDPALVHQRPAPPS
Chain 2: FAP-H6L7-huIgG1(L234A, L235A, P329A)-
delK-GGSPLG
(SEQ ID NO: 564)
QVQLVQSGAEVKKPGASVKVSCKASGYTFTENIIHWVRQAPGQGLEWMGW
IHPGSGSIKYAQKLQGRVTMTTDTSTSTAYMELRSLRSDDTAVYYCARHG
GTGRGAMDYWGQGTLVTVSSASTKGPSVFPLAPSSKSTSGGTAALGCLVK
DYFPEPVTVSWNSGALTSGVHTFPAVLQSSGLYSLSSVVTVPSSSLGTQT
YICNVNHKPSNTKVDKKVEPKSCDKTHTCPPCPAPEAAGGPSVFLFPPKP
KDTLMISRTPEVTCVVVDVSHEDPEVKFNWYVDGVEVHNAKTKPREEQYN
STYRVVSVLTVLHQDWLNGKEYKCKVSNKALAAPIEKTISKAKGQPREPQ
VYTLPPSRDELTKNQVSLTCLVKGFYPSDIAVEWESNGQPENNYKTTPPV
LDSDGSFFLYSKLTVDKSRWQQGNVFSCSVMHEALHNHYTQKSLSLSPGG
GSPLG
Chain 3: LAGGGS-IL-15(S162A)-GGGSGGGSGRSDNQGGGSG-
IL-15Rα(T2A)
(SEQ ID NO: 565)
LAGGGSNWVNVISDLKKIEDLIQSMHIDATLYTESDVHPSCKVTAMKCFL
LELQVISLESGDASIHDTVENLIILANNSLSSNGNVTESGCKECEELEEK
NIKEFLQSFVHIVQMFINTAGGGSGGGSGRSDNQGGGSGIACPPPMSVEH
ADIWVKSYSLYSRERYICNSGFKRKAGTSSLTECVLNKATNVAHWTTPSL
KCIRDPALVHQRPAPPS
Chain 4 and 5: FAP-L7-huIgKLC
(SEQ ID NO: 566)
EIVLTQSPGTLSLSPGERATLSCRASQSVSTSAYSYMHWYQQKPGQAPRL
LIYLASNLESGIPDRFSGSGSGTDFTLTISRLEPEDFAVYYCQQSRELPY
TEGQGTKLEIKRTVAAPSVFIFPPSDEQLKSGTASVVCLLNNFYPREAKV
QWKVDNALQSGNSQESVTEQDSKDSTYSLSSTLTLSKADYEKHKVYACEV
THQGLSSPVTKSFNRGEC

[0404] Expected Cleavage Products from uPA/Matriptase and MMP-2/MMP-9 Cleavage of P24872158:

1) FAP-H6L7-huIgG1(L234A, L235A, P329A)-delK-GGSPLG/LAGGGS-IL-
15(S162A)-GGGSGGGSGR/SDNQGGGSG-IL-15Rα(T2A)/FAP-L7-huIgKLC (product
from complete cleavage)
Chains 1 and 2: FAP-H6L7-huIgG1(L234A, L235A, P329A)-delK-GGSPLG
(SEQ ID NO: 567)
QVQLVQSGAEVKKPGASVKVSCKASGYTFTENIIHWVRQAPGQGLEWMGWIHPGSGSIKYAQK
LQGRVTMTTDTSTSTAYMELRSLRSDDTAVYYCARHGGTGRGAMDYWGQGTLVTVSSASTKGPSVFPLAPSSKST
SGGTAALGCLVKDYFPEPVTVSWNSGALTSGVHTFPAVLQSSGLYSLSSVVTVPSSSLGTQTYICNVNHKPSNTK
VDKKVEPKSCDKTHTCPPCPAPEAAGGPSVFLFPPKPKDTLMISRTPEVTCVVVDVSHEDPEVKFNWYVDGVEVH
NAKTKPREEQYNSTYRVVSVLTVLHQDWLNGKEYKCKVSNKALAAPIEKTISKAKGQPREPQVYTLPPSRDELTK
NQVSLTCLVKGFYPSDIAVEWESNGQPENNYKTTPPVLDSDGSFFLYSKLTVDKSRWQQGNVFSCSVMHEALHNH
YTQKSLSLSPGGGSPLG
Chains 3 and 4: LAGGGS-IL-15(S162A)-GGGSGGGSGRSDNQGGGSG-IL-
15Rα(T2A)
(SEQ ID NO: 568)
LAGGGSNWVNVISDLKKIEDLIQSMHIDATLYTESDVHPSCKVTAMKCFLLELQVISLESGDA
SIHDTVENLIILANNSLSSNGNVTESGCKECEELEEKNIKEFLQSFVHIVQMFINTAGGGSGGGSGR
Chains 5 and 6: SDNQGGGSG-IL-15Rα(T2A)
(SEQ ID NO: 569)
SDNQGGGSGIACPPPMSVEHADIWVKSYSLYSRERYICNSGFKRKAGTSSLTECVLNKATNVA
HWTTPSLKCIRDPALVHQRPAPPS
Chains 7 and 8: FAP-L7-huIgKLC
(SEQ ID NO: 570)
EIVLTQSPGTLSLSPGERATLSCRASQSVSTSAYSYMHWYQQKPGQAPRLLIYLASNLESGIP
DRFSGSGSGTDFTLTISRLEPEDFAVYYCQQSRELPYTEGQGTKLEIKRTVAAPSVFIFPPSDEQLKSGTASVVC
LLNNFYPREAKVQWKVDNALQSGNSQESVTEQDSKDSTYSLSSTLTLSKADYEKHKVYACEVTHQGLSSPVTKSF
NRGEC
2) FAP-H6L7-huIgG1(L234A, L235A, P329A)-delK-GGSPLGLAGGGS-IL-
15(S162A)-GGGSGGGSGRSDNQGGGSG-IL-15Rα(T2A)/FAP-H6L7-
huIgG1(L234A, L235A, P329A)-delK-GGSPLG/LAGGGS-IL-15(S162A)-
GGGSGGGSGR/SDNQGGGSG-IL-15Rα(T2A)/FAP-L7-huIgKLC (product from partial
cleavage, active)
Chain 1: FAP-H6L7-huIgG1(L234A, L235A, P329A)-delK-GGSPLGLAGGGS-
IL-15(S162A)-GGGSGGGSGRSDNQGGGSG-IL-15Rα(T2A)
(SEQ ID NO: 571)
QVQLVQSGAEVKKPGASVKVSCKASGYTFTENIIHWVRQAPGQGLEWMGWIHPGSGSIKYAQK
LQGRVTMTTDTSTSTAYMELRSLRSDDTAVYYCARHGGTGRGAMDYWGQGTLVTVSSASTKGPSVFPLAPSSKST
SGGTAALGCLVKDYFPEPVTVSWNSGALTSGVHTFPAVLQSSGLYSLSSVVTVPSSSLGTQTYICNVNHKPSNTK
VDKKVEPKSCDKTHTCPPCPAPEAAGGPSVFLFPPKPKDTLMISRTPEVTCVVVDVSHEDPEVKFNWYVDGVEVH
NAKTKPREEQYNSTYRVVSVLTVLHQDWLNGKEYKCKVSNKALAAPIEKTISKAKGQPREPQVYTLPPSRDELTK
NQVSLTCLVKGFYPSDIAVEWESNGQPENNYKTTPPVLDSDGSFFLYSKLTVDKSRWQQGNVFSCSVMHEALHNH
YTQKSLSLSPGGGSPLGLAGGGSNWVNVISDLKKIEDLIQSMHIDATLYTESDVHPSCKVTAMKCFLLELQVISL
ESGDASIHDTVENLIILANNSLSSNGNVTESGCKECEELEEKNIKEFLQSFVHIVQMFINTAGGGSGGGSGRSDN
QGGGSGIACPPPMSVEHADIWVKSYSLYSRERYICNSGFKRKAGTSSLTECVLNKATNVAHWTTPSLKCIRDPAL
VHQRPAPPS
Chain 2: FAP-H6L7-huIgG1(L234A, L235A, P329A)-delK-GGSPLG
(SEQ ID NO: 572)
QVQLVQSGAEVKKPGASVKVSCKASGYTFTENIIHWVRQAPGQGLEWMGWIHPGSGSIKYAQK
LQGRVTMTTDTSTSTAYMELRSLRSDDTAVYYCARHGGTGRGAMDYWGQGTLVTVSSASTKGPSVFPLAPSSKST
SGGTAALGCLVKDYFPEPVTVSWNSGALTSGVHTFPAVLQSSGLYSLSSVVTVPSSSLGTQTYICNVNHKPSNTK
VDKKVEPKSCDKTHTCPPCPAPEAAGGPSVFLFPPKPKDTLMISRTPEVTCVVVDVSHEDPEVKFNWYVDGVEVH
NAKTKPREEQYNSTYRVVSVLTVLHQDWLNGKEYKCKVSNKALAAPIEKTISKAKGQPREPQVYTLPPSRDELTK
NQVSLTCLVKGFYPSDIAVEWESNGQPENNYKTTPPVLDSDGSFFLYSKLTVDKSRWQQGNVFSCSVMHEALHNH
YTQKSLSLSPGGGSPLG
Chain 3: LAGGGS-IL-15(S162A)-GGGSGGGSGR
(SEQ ID NO: 573)
LAGGGSNWVNVISDLKKIEDLIQSMHIDATLYTESDVHPSCKVTAMKCFLLELQVISLESGDA
SIHDTVENLIILANNSLSSNGNVTESGCKECEELEEKNIKEFLQSFVHIVQMFINTAGGGSGGGSGR
Chain 4: SDNQGGGSG-IL-15Rα(T2A)
(SEQ ID NO: 574)
SDNQGGGSGIACPPPMSVEHADIWVKSYSLYSRERYICNSGFKRKAGTSSLTECVLNKATNVA
HWTTPSLKCIRDPALVHQRPAPPS
Chain 5 and 6: FAP-L7-huIgKLC
(SEQ ID NO: 575)
EIVLTQSPGTLSLSPGERATLSCRASQSVSTSAYSYMHWYQQKPGQAPRLLIYLASNLESGIP
DRFSGSGSGTDFTLTISRLEPEDFAVYYCQQSRELPYTEGQGTKLEIKRTVAAPSVFIFPPSDEQLKSGTASVVC
LLNNFYPREAKVQWKVDNALQSGNSQESVTEQDSKDSTYSLSSTLTLSKADYEKHKVYACEVTHQGLSSPVTKSF
NRGEC
3) FAP-H6L7-huIgG1(L234A, L235A, P329A)-delK-GGSPLGLAGGGS-IL-
15(S162A)-GGGSGGGSGRSDNQGGGSG-IL-15Rα(T2A)/FAP-H6L7-
huIgG1(L234A, L235A, P329A)-delK-GGSPLGLAGGGS-IL-15(S162A)-
GGGSGGGSGR/SDNQGGGSG-IL-15Rα(T2A)/FAP-L7-huIgKLC (product from partial
cleavage, active)
Chain 1: FAP-H6L7-huIgG1(L234A, L235A, P329A)-delK-GGSPLGLAGGGS-
IL-15(S162A)-GGGSGGGSGRSDNQGGGSG-IL-15Rα(T2A)
(SEQ ID NO: 576)
QVQLVQSGAEVKKPGASVKVSCKASGYTFTENIIHWVRQAPGQGLEWMGWIHPGSGSIKYAQK
LQGRVTMTTDTSTSTAYMELRSLRSDDTAVYYCARHGGTGRGAMDYWGQGTLVTVSSASTKGPSVFPLAPSSKST
SGGTAALGCLVKDYFPEPVTVSWNSGALTSGVHTFPAVLQSSGLYSLSSVVTVPSSSLGTQTYICNVNHKPSNTK
VDKKVEPKSCDKTHTCPPCPAPEAAGGPSVFLFPPKPKDTLMISRTPEVTCVVVDVSHEDPEVKFNWYVDGVEVH
NAKTKPREEQYNSTYRVVSVLTVLHQDWLNGKEYKCKVSNKALAAPIEKTISKAKGQPREPQVYTLPPSRDELTK
NQVSLTCLVKGFYPSDIAVEWESNGQPENNYKTTPPVLDSDGSFFLYSKLTVDKSRWQQGNVFSCSVMHEALHNH
YTQKSLSLSPGGGSPLGLAGGGSNWVNVISDLKKIEDLIQSMHIDATLYTESDVHPSCKVTAMKCFLLELQVISL
ESGDASIHDTVENLIILANNSLSSNGNVTESGCKECEELEEKNIKEFLQSFVHIVQMFINTAGGGSGGGSGRSDN
QGGGSGIACPPPMSVEHADIWVKSYSLYSRERYICNSGFKRKAGTSSLTECVLNKATNVAHWTTPSLKCIRDPAL
VHQRPAPPS
Chain 2: FAP-H6L7-huIgG1(L234A, L235A, P329A)-delK-GGSPLGLAGGGS-
IL-15(S162A)-GGGSGGGSGR
(SEQ ID NO: 577)
QVQLVQSGAEVKKPGASVKVSCKASGYTFTENIIHWVRQAPGQGLEWMGWIHPGSGSIKYAQK
LQGRVTMTTDTSTSTAYMELRSLRSDDTAVYYCARHGGTGRGAMDYWGQGTLVTVSSASTKGPSVFPLAPSSKST
SGGTAALGCLVKDYFPEPVTVSWNSGALTSGVHTFPAVLQSSGLYSLSSVVTVPSSSLGTQTYICNVNHKPSNTK
VDKKVEPKSCDKTHTCPPCPAPEAAGGPSVFLFPPKPKDTLMISRTPEVTCVVVDVSHEDPEVKFNWYVDGVEVH
NAKTKPREEQYNSTYRVVSVLTVLHQDWLNGKEYKCKVSNKALAAPIEKTISKAKGQPREPQVYTLPPSRDELTK
NQVSLTCLVKGFYPSDIAVEWESNGQPENNYKTTPPVLDSDGSFFLYSKLTVDKSRWQQGNVFSCSVMHEALHNH
YTQKSLSLSPGGGSPLGLAGGGSNWVNVISDLKKIEDLIQSMHIDATLYTESDVHPSCKVTAMKCFLLELQVISL
ESGDASIHDTVENLIILANNSLSSNGNVTESGCKECEELEEKNIKEFLQSFVHIVQMFINTAGGGSGGGSGR
Chain 3: SDNQGGGSG-IL-15Rα(T2A)
(SEQ ID NO: 578)
SDNQGGGSGIACPPPMSVEHADIWVKSYSLYSRERYICNSGFKRKAGTSSLTECVLNKATNVA
HWTTPSLKCIRDPALVHQRPAPPS
Chain 4 and 5: FAP-L7-huIgKLC
(SEQ ID NO: 579)
EIVLTQSPGTLSLSPGERATLSCRASQSVSTSAYSYMHWYQQKPGQAPRLLIYLASNLESGIP
DRFSGSGSGTDFTLTISRLEPEDFAVYYCQQSRELPYTEGQGTKLEIKRTVAAPSVFIFPPSDEQLKSGTASVVC
LLNNFYPREAKVQWKVDNALQSGNSQESVTEQDSKDSTYSLSSTLTLSKADYEKHKVYACEVTHQGLSSPVTKSF
NRGEC
4) FAP-H6L7-huIgG1(L234A, L235A, P329A)-delK-GGSPLGLAGGGS-IL-
15(S162A)-GGGSGGGSGRSDNQGGGSG-IL-15Rα(T2A)/FAP-H6L7-
huIgG1(L234A, L235A, P329A)-delK-GGSPLG/LAGGGS-IL-15(S162A)-
GGGSGGGSGRSDNQGGGSG-IL-15Rα(T2A)/FAP-L7-huIgKLC (product from partial
cleavage, active)
Chain 1: FAP-H6L7-huIgG1(L234A, L235A, P329A)-delK-GGSPLGLAGGGS-
IL-15(S162A)-GGGSGGGSGRSDNQGGGSG-IL-15Rα(T2A)
(SEQ ID NO: 580)
QVQLVQSGAEVKKPGASVKVSCKASGYTFTENIIHWVRQAPGQGLEWMGWIHPGSGSIKYAQK
LQGRVTMTTDTSTSTAYMELRSLRSDDTAVYYCARHGGTGRGAMDYWGQGTLVTVSSASTKGPSVFPLAPSSKST
SGGTAALGCLVKDYFPEPVTVSWNSGALTSGVHTFPAVLQSSGLYSLSSVVTVPSSSLGTQTYICNVNHKPSNTK
VDKKVEPKSCDKTHTCPPCPAPEAAGGPSVFLFPPKPKDTLMISRTPEVTCVVVDVSHEDPEVKFNWYVDGVEVH
NAKTKPREEQYNSTYRVVSVLTVLHQDWLNGKEYKCKVSNKALAAPIEKTISKAKGQPREPQVYTLPPSRDELTK
NQVSLTCLVKGFYPSDIAVEWESNGQPENNYKTTPPVLDSDGSFFLYSKLTVDKSRWQQGNVFSCSVMHEALHNH
YTQKSLSLSPGGGSPLGLAGGGSNWVNVISDLKKIEDLIQSMHIDATLYTESDVHPSCKVTAMKCFLLELQVISL
ESGDASIHDTVENLIILANNSLSSNGNVTESGCKECEELEEKNIKEFLQSFVHIVQMFINTAGGGSGGGSGRSDN
QGGGSGIACPPPMSVEHADIWVKSYSLYSRERYICNSGFKRKAGTSSLTECVLNKATNVAHWTTPSLKCIRDPAL
VHQRPAPPS
Chain 2: FAP-H6L7-huIgG1(L234A, L235A, P329A)-delK-GGSPLG
(SEQ ID NO: 581)
QVQLVQSGAEVKKPGASVKVSCKASGYTFTENIIHWVRQAPGQGLEWMGWIHPGSGSIKYAQK
LQGRVTMTTDTSTSTAYMELRSLRSDDTAVYYCARHGGTGRGAMDYWGQGTLVTVSSASTKGPSVFPLAPSSKST
SGGTAALGCLVKDYFPEPVTVSWNSGALTSGVHTFPAVLQSSGLYSLSSVVTVPSSSLGTQTYICNVNHKPSNTK
VDKKVEPKSCDKTHTCPPCPAPEAAGGPSVFLFPPKPKDTLMISRTPEVTCVVVDVSHEDPEVKFNWYVDGVEVH
NAKTKPREEQYNSTYRVVSVLTVLHQDWLNGKEYKCKVSNKALAAPIEKTISKAKGQPREPQVYTLPPSRDELTK
NQVSLTCLVKGFYPSDIAVEWESNGQPENNYKTTPPVLDSDGSFFLYSKLTVDKSRWQQGNVFSCSVMHEALHNH
YTQKSLSLSPGGGSPLG
Chain 3: LAGGGS-IL-15(S162A)-GGGSGGGSGRSDNQGGGSG-IL-15Rα(T2A)
(SEQ ID NO: 582)
LAGGGSNWVNVISDLKKIEDLIQSMHIDATLYTESDVHPSCKVTAMKCFLLELQVISLESGDA
SIHDTVENLIILANNSLSSNGNVTESGCKECEELEEKNIKEFLQSFVHIVQMFINTAGGGSGGGSGRSDNQGGGS
GIACPPPMSVEHADIWVKSYSLYSRERYICNSGFKRKAGTSSLTECVLNKATNVAHWTTPSLKCIRDPALVHQRP
APPS
Chain 4 and 5: FAP-L7-huIgKLC
(SEQ ID NO: 583)
EIVLTQSPGTLSLSPGERATLSCRASQSVSTSAYSYMHWYQQKPGQAPRLLIYLASNLESGIP
DRFSGSGSGTDFTLTISRLEPEDFAVYYCQQSRELPYTEGQGTKLEIKRTVAAPSVFIFPPSDEQLKSGTASVVC
LLNNFYPREAKVQWKVDNALQSGNSQESVTEQDSKDSTYSLSSTLTLSKADYEKHKVYACEVTHQGLSSPVTKSF
NRGEC
5) FAP-H6L7-huIgG1(L234A, L235A, P329A)-delK-GGSPLG/LAGGGS-IL-
15(S162A)-GGGSGGGSGRSDNQGGGSG-IL-15Rα(T2A)/FAP-H6L7-
huIgG1(L234A, L235A, P329A)-delK-GGSPLGLAGGGS-IL-15(S162A)-
GGGSGGGSGR/SDNQGGGSG-IL-15Rα(T2A)/FAP-L7-huIgKLC (product from partial
cleavage, active)
Chain 1: FAP-H6L7-huIgG1(L234A, L235A, P329A)-delK-GGSPLG
(SEQ ID NO: 584)
QVQLVQSGAEVKKPGASVKVSCKASGYTFTENIIHWVRQAPGQGLEWMGWIHPGSGSIKYAQK
LQGRVTMTTDTSTSTAYMELRSLRSDDTAVYYCARHGGTGRGAMDYWGQGTLVTVSSASTKGPSVFPLAPSSKST
SGGTAALGCLVKDYFPEPVTVSWNSGALTSGVHTFPAVLQSSGLYSLSSVVTVPSSSLGTQTYICNVNHKPSNTK
VDKKVEPKSCDKTHTCPPCPAPEAAGGPSVFLFPPKPKDTLMISRTPEVTCVVVDVSHEDPEVKFNWYVDGVEVH
NAKTKPREEQYNSTYRVVSVLTVLHQDWLNGKEYKCKVSNKALAAPIEKTISKAKGQPREPQVYTLPPSRDELTK
NQVSLTCLVKGFYPSDIAVEWESNGQPENNYKTTPPVLDSDGSFFLYSKLTVDKSRWQQGNVFSCSVMHEALHNH
YTQKSLSLSPGGGSPLG
Chain 2: LAGGGS-IL-15(S162A)-GGGSGGGSGRSDNQGGGSG-IL-15Rα(T2A)
(SEQ ID NO: 585)
LAGGGSNWVNVISDLKKIEDLIQSMHIDATLYTESDVHPSCKVTAMKCFLLELQVISLESGDA
SIHDTVENLIILANNSLSSNGNVTESGCKECEELEEKNIKEFLQSFVHIVQMFINTAGGGSGGGSGRSDNQGGGS
GIACPPPMSVEHADIWVKSYSLYSRERYICNSGFKRKAGTSSLTECVLNKATNVAHWTTPSLKCIRDPALVHQRP
APPS
Chain 3: FAP-H6L7-huIgG1(L234A, L235A, P329A)-delK-GGSPLGLAGGGS-
IL-15(S162A)-GGGSGGGSGR
(SEQ ID NO: 586)
QVQLVQSGAEVKKPGASVKVSCKASGYTFTENIIHWVRQAPGQGLEWMGWIHPGSGSIKYAQK
LQGRVTMTTDTSTSTAYMELRSLRSDDTAVYYCARHGGTGRGAMDYWGQGTLVTVSSASTKGPSVFPLAPSSKST
SGGTAALGCLVKDYFPEPVTVSWNSGALTSGVHTFPAVLQSSGLYSLSSVVTVPSSSLGTQTYICNVNHKPSNTK
VDKKVEPKSCDKTHTCPPCPAPEAAGGPSVFLFPPKPKDTLMISRTPEVTCVVVDVSHEDPEVKFNWYVDGVEVH
NAKTKPREEQYNSTYRVVSVLTVLHQDWLNGKEYKCKVSNKALAAPIEKTISKAKGQPREPQVYTLPPSRDELTK
NQVSLTCLVKGFYPSDIAVEWESNGQPENNYKTTPPVLDSDGSFFLYSKLTVDKSRWQQGNVFSCSVMHEALHNH
YTQKSLSLSPGGGSPLGLAGGGSNWVNVISDLKKIEDLIQSMHIDATLYTESDVHPSCKVTAMKCFLLELQVISL
ESGDASIHDTVENLIILANNSLSSNGNVTESGCKECEELEEKNIKEFLQSFVHIVQMFINTAGGGSGGGSGR
Chain 4: SDNQGGGSG-IL-15Rα(T2A)
(SEQ ID NO: 587)
SDNQGGGSGIACPPPMSVEHADIWVKSYSLYSRERYICNSGFKRKAGTSSLTECVLNKATNVA
HWTTPSLKCIRDPALVHQRPAPPS
Chain 5 and 6: FAP-L7-huIgKLC
(SEQ ID NO: 588)
EIVLTQSPGTLSLSPGERATLSCRASQSVSTSAYSYMHWYQQKPGQAPRLLIYLASNLESGIP
DRFSGSGSGTDFTLTISRLEPEDFAVYYCQQSRELPYTEGQGTKLEIKRTVAAPSVFIFPPSDEQLKSGTASVVC
LLNNFYPREAKVQWKVDNALQSGNSQESVTEQDSKDSTYSLSSTLTLSKADYEKHKVYACEVTHQGLSSPVTKSF
NRGEC
6) FAP-H6L7-huIgG1(L234A, L235A, P329A)-delK-GGSPLG/LAGGGS-IL-
15(S162A)-GGGSGGGSGRSDNQGGGSG-IL-15Rα(T2A)/FAP-H6L7-
huIgG1(L234A, L235A, P329A)-delK-GGSPLG/LAGGGS-IL-15(S162A)-
GGGSGGGSGR/SDNQGGGSG-IL-15Rα(T2A)/FAP-L7-huIgKLC (product from partial
cleavage, active)
Chain 1: FAP-H6L7-huIgG1(L234A, L235A, P329A)-delK-GGSPLG
(SEQ ID NO: 589)
QVQLVQSGAEVKKPGASVKVSCKASGYTFTENIIHWVRQAPGQGLEWMGWIHPGSGSIKYAQK
LQGRVTMTTDTSTSTAYMELRSLRSDDTAVYYCARHGGTGRGAMDYWGQGTLVTVSSASTKGPSVFPLAPSSKST
SGGTAALGCLVKDYFPEPVTVSWNSGALTSGVHTFPAVLQSSGLYSLSSVVTVPSSSLGTQTYICNVNHKPSNTK
VDKKVEPKSCDKTHTCPPCPAPEAAGGPSVFLFPPKPKDTLMISRTPEVTCVVVDVSHEDPEVKFNWYVDGVEVH
NAKTKPREEQYNSTYRVVSVLTVLHQDWLNGKEYKCKVSNKALAAPIEKTISKAKGQPREPQVYTLPPSRDELTK
NQVSLTCLVKGFYPSDIAVEWESNGQPENNYKTTPPVLDSDGSFFLYSKLTVDKSRWQQGNVFSCSVMHEALHNH
YTQKSLSLSPGGGSPLG
Chain 2: LAGGGS-IL-15(S162A)-GGGSGGGSGRSDNQGGGSG-IL-15Rα(T2A)
(SEQ ID NO: 590)
LAGGGSNWVNVISDLKKIEDLIQSMHIDATLYTESDVHPSCKVTAMKCFLLELQVISLESGDA
SIHDTVENLIILANNSLSSNGNVTESGCKECEELEEKNIKEFLQSFVHIVQMFINTAGGGSGGGSGRSDNQGGGS
GIACPPPMSVEHADIWVKSYSLYSRERYICNSGFKRKAGTSSLTECVLNKATNVAHWTTPSLKCIRDPALVHQRP
APPS
Chain 3: FAP-H6L7-huIgG1(L234A, L235A, P329A)-delK-GGSPLGLAGGGS-
IL-15(S162A)-GGGSGGGSGR
(SEQ ID NO: 591)
QVQLVQSGAEVKKPGASVKVSCKASGYTFTENIIHWVRQAPGQGLEWMGWIHPGSGSIKYAQK
LQGRVTMTTDTSTSTAYMELRSLRSDDTAVYYCARHGGTGRGAMDYWGQGTLVTVSSASTKGPSVFPLAPSSKST
SGGTAALGCLVKDYFPEPVTVSWNSGALTSGVHTFPAVLQSSGLYSLSSVVTVPSSSLGTQTYICNVNHKPSNTK
VDKKVEPKSCDKTHTCPPCPAPEAAGGPSVFLFPPKPKDTLMISRTPEVTCVVVDVSHEDPEVKFNWYVDGVEVH
NAKTKPREEQYNSTYRVVSVLTVLHQDWLNGKEYKCKVSNKALAAPIEKTISKAKGQPREPQVYTLPPSRDELTK
NQVSLTCLVKGFYPSDIAVEWESNGQPENNYKTTPPVLDSDGSFFLYSKLTVDKSRWQQGNVFSCSVMHEALHNH
YTQKSLSLSPGGGSPLG
Chain 4: LAGGGS-IL-15(S162A)-GGGSGGGSGR
(SEQ ID NO: 592)
LAGGGSNWVNVISDLKKIEDLIQSMHIDATLYTESDVHPSCKVTAMKCFLLELQVISLESGDA
SIHDTVENLIILANNSLSSNGNVTESGCKECEELEEKNIKEFLQSFVHIVQMFINTAGGGSGGGSGR
Chain 5: SDNQGGGSG-IL-15Rα(T2A)
(SEQ ID NO: 593)
SDNQGGGSGIACPPPMSVEHADIWVKSYSLYSRERYICNSGFKRKAGTSSLTECVLNKATNVA
HWTTPSLKCIRDPALVHQRPAPPS
Chain 6 and 7: FAP-L7-huIgKLC
(SEQ ID NO: 594)
EIVLTQSPGTLSLSPGERATLSCRASQSVSTSAYSYMHWYQQKPGQAPRLLIYLASNLESGIP
DRFSGSGSGTDFTLTISRLEPEDFAVYYCQQSRELPYTEGQGTKLEIKRTVAAPSVFIFPPSDEQLKSGTASVVC
LLNNFYPREAKVQWKVDNALQSGNSQESVTEQDSKDSTYSLSSTLTLSKADYEKHKVYACEVTHQGLSSPVTKSF
NRGEC
7) FAP-H6L7-huIgG1(L234A, L235A, P329A)-delK-GGSPLGLAGGGS-IL-
15(S162A)-GGGSGGGSGR/SDNQGGGSG-IL-15Rα(T2A)/FAP-H6L7-
huIgG1(L234A, L235A, P329A)-delK-GGSPLG/LAGGGS-IL-15(S162A)-
GGGSGGGSGR/SDNQGGGSG-IL-15Rα(T2A)/FAP-L7-huIgKLC (product from partial
cleavage, active)
Chain 1: FAP-H6L7-huIgG1(L234A, L235A, P329A)-delK-GGSPLGLAGGGS-
IL-15(S162A)-GGGSGGGSGR
(SEQ ID NO: 595)
QVQLVQSGAEVKKPGASVKVSCKASGYTFTENIIHWVRQAPGQGLEWMGWIHPGSGSIKYAQK
LQGRVTMTTDTSTSTAYMELRSLRSDDTAVYYCARHGGTGRGAMDYWGQGTLVTVSSASTKGPSVFPLAPSSKST
SGGTAALGCLVKDYFPEPVTVSWNSGALTSGVHTFPAVLQSSGLYSLSSVVTVPSSSLGTQTYICNVNHKPSNTK
VDKKVEPKSCDKTHTCPPCPAPEAAGGPSVFLFPPKPKDTLMISRTPEVTCVVVDVSHEDPEVKFNWYVDGVEVH
NAKTKPREEQYNSTYRVVSVLTVLHQDWLNGKEYKCKVSNKALAAPIEKTISKAKGQPREPQVYTLPPSRDELTK
NQVSLTCLVKGFYPSDIAVEWESNGQPENNYKTTPPVLDSDGSFFLYSKLTVDKSRWQQGNVFSCSVMHEALHNH
YTQKSLSLSPGGGSPLGLAGGGSNWVNVISDLKKIEDLIQSMHIDATLYTESDVHPSCKVTAMKCFLLELQVISL
ESGDASIHDTVENLIILANNSLSSNGNVTESGCKECEELEEKNIKEFLQSFVHIVQMFINTAGGGSGGGSGR
Chain 2: SDNQGGGSG-IL-15Rα(T2A)
(SEQ ID NO: 596)
SDNQGGGSGIACPPPMSVEHADIWVKSYSLYSRERYICNSGFKRKAGTSSLTECVLNKATNVA
HWTTPSLKCIRDPALVHQRPAPPS
Chain 3: FAP-H6L7-huIgG1(L234A, L235A, P329A)-delK-GGSPLGLAGGGS-
IL-15(S162A)-GGGSGGGSGR
(SEQ ID NO: 597)
QVQLVQSGAEVKKPGASVKVSCKASGYTFTENIIHWVRQAPGQGLEWMGWIHPGSGSIKYAQK
LQGRVTMTTDTSTSTAYMELRSLRSDDTAVYYCARHGGTGRGAMDYWGQGTLVTVSSASTKGPSVFPLAPSSKST
SGGTAALGCLVKDYFPEPVTVSWNSGALTSGVHTFPAVLQSSGLYSLSSVVTVPSSSLGTQTYICNVNHKPSNTK
VDKKVEPKSCDKTHTCPPCPAPEAAGGPSVFLFPPKPKDTLMISRTPEVTCVVVDVSHEDPEVKFNWYVDGVEVH
NAKTKPREEQYNSTYRVVSVLTVLHQDWLNGKEYKCKVSNKALAAPIEKTISKAKGQPREPQVYTLPPSRDELTK
NQVSLTCLVKGFYPSDIAVEWESNGQPENNYKTTPPVLDSDGSFFLYSKLTVDKSRWQQGNVFSCSVMHEALHNH
YTQKSLSLSPGGGSPLG
Chain 4: LAGGGS-IL-15(S162A)-GGGSGGGSGR
(SEQ ID NO: 598)
LAGGGSNWVNVISDLKKIEDLIQSMHIDATLYTESDVHPSCKVTAMKCFLLELQVISLESGDA
SIHDTVENLIILANNSLSSNGNVTESGCKECEELEEKNIKEFLQSFVHIVQMFINTAGGGSGGGSGR
Chain 5: SDNQGGGSG-IL-15Rα(T2A)
(SEQ ID NO: 599)
SDNQGGGSGIACPPPMSVEHADIWVKSYSLYSRERYICNSGFKRKAGTSSLTECVLNKATNVA
HWTTPSLKCIRDPALVHQRPAPPS
Chain 6 and 7: FAP-L7-huIgKLC
(SEQ ID NO: 600)
EIVLTQSPGTLSLSPGERATLSCRASQSVSTSAYSYMHWYQQKPGQAPRLLIYLASNLESGIP
DRFSGSGSGTDFTLTISRLEPEDFAVYYCQQSRELPYTEGQGTKLEIKRTVAAPSVFIFPPSDEQLKSGTASVVC
LLNNFYPREAKVQWKVDNALQSGNSQESVTEQDSKDSTYSLSSTLTLSKADYEKHKVYACEVTHQGLSSPVTKSF
NRGEC
8) FAP-H6L7-huIgG1(L234A, L235A, P329A)-delK-GGSPLGLAGGGS-IL-
15(S162A)-GGGSGGGSGR/SDNQGGGSG-IL-15Rα(T2A)/FAP-L7-huIgKLC (product from
partial cleavage, active)
Chains 1 and 2: FAP-H6L7-huIgG1(L234A, L235A, P329A)-delK-
GGSPLGLAGGGS-IL-15(S162A)-GGGSGGGSGR
(SEQ ID NO: 601)
QVQLVQSGAEVKKPGASVKVSCKASGYTFTENIIHWVRQAPGQGLEWMGWIHPGSGSIKYAQK
LQGRVTMTTDTSTSTAYMELRSLRSDDTAVYYCARHGGTGRGAMDYWGQGTLVTVSSASTKGPSVFPLAPSSKST
SGGTAALGCLVKDYFPEPVTVSWNSGALTSGVHTFPAVLQSSGLYSLSSVVTVPSSSLGTQTYICNVNHKPSNTK
VDKKVEPKSCDKTHTCPPCPAPEAAGGPSVFLFPPKPKDTLMISRTPEVTCVVVDVSHEDPEVKFNWYVDGVEVH
NAKTKPREEQYNSTYRVVSVLTVLHQDWLNGKEYKCKVSNKALAAPIEKTISKAKGQPREPQVYTLPPSRDELTK
NQVSLTCLVKGFYPSDIAVEWESNGQPENNYKTTPPVLDSDGSFFLYSKLTVDKSRWQQGNVFSCSVMHEALHNH
YTQKSLSLSPGGGSPLGLAGGGSNWVNVISDLKKIEDLIQSMHIDATLYTESDVHPSCKVTAMKCFLLELQVISL
ESGDASIHDTVENLIILANNSLSSNGNVTESGCKECEELEEKNIKEFLQSFVHIVQMFINTAGGGSGGGSGR
Chains 3 and 4: SDNQGGGSG-IL-15Rα(T2A)
(SEQ ID NO: 602)
SDNQGGGSGIACPPPMSVEHADIWVKSYSLYSRERYICNSGFKRKAGTSSLTECVLNKATNVA
HWTTPSLKCIRDPALVHQRPAPPS
Chain 5 and 6: FAP-L7-huIgKLC
(SEQ ID NO: 603)
EIVLTQSPGTLSLSPGERATLSCRASQSVSTSAYSYMHWYQQKPGQAPRLLIYLASNLESGIP
DRFSGSGSGTDFTLTISRLEPEDFAVYYCQQSRELPYTEGQGTKLEIKRTVAAPSVFIFPPSDEQLKSGTASVVC
LLNNFYPREAKVQWKVDNALQSGNSQESVTEQDSKDSTYSLSSTLTLSKADYEKHKVYACEVTHQGLSSPVTKSF
NRGEC
9) FAP-H6L7-huIgG1(L234A, L235A, P329A)-delK-GGSPLG/LAGGGS-IL-
15(S162A)-GGGSGGGSGRSDNQGGGSG-IL-15Rα(T2A)/FAP-L7-huIgKLC (product from
partial cleavage, active)
Chains 1 and 2: FAP-H6L7-huIgG1(L234A, L235A, P329A)-delK-GGSPLG
(SEQ ID NO: 604)
QVQLVQSGAEVKKPGASVKVSCKASGYTFTENIIHWVRQAPGQGLEWMGWIHPGSGSIKYAQK
LQGRVTMTTDTSTSTAYMELRSLRSDDTAVYYCARHGGTGRGAMDYWGQGTLVTVSSASTKGPSVFPLAPSSKST
SGGTAALGCLVKDYFPEPVTVSWNSGALTSGVHTFPAVLQSSGLYSLSSVVTVPSSSLGTQTYICNVNHKPSNTK
VDKKVEPKSCDKTHTCPPCPAPEAAGGPSVFLFPPKPKDTLMISRTPEVTCVVVDVSHEDPEVKFNWYVDGVEVH
NAKTKPREEQYNSTYRVVSVLTVLHQDWLNGKEYKCKVSNKALAAPIEKTISKAKGQPREPQVYTLPPSRDELTK
NQVSLTCLVKGFYPSDIAVEWESNGQPENNYKTTPPVLDSDGSFFLYSKLTVDKSRWQQGNVFSCSVMHEALHNH
YTQKSLSLSPGGGSPLG
Chains 3 and 4: LAGGGS-IL-15(S162A)-GGGSGGGSGRSDNQGGGSG-IL-
15Rα(T2A)
(SEQ ID NO: 605)
LAGGGSNWVNVISDLKKIEDLIQSMHIDATLYTESDVHPSCKVTAMKCFLLELQVISLESGDA
SIHDTVENLIILANNSLSSNGNVTESGCKECEELEEKNIKEFLQSFVHIVQMFINTAGGGSGGGSGRSDNQGGGS
GIACPPPMSVEHADIWVKSYSLYSRERYICNSGFKRKAGTSSLTECVLNKATNVAHWTTPSLKCIRDPALVHQRP
APPS
Chain 5 and 6: FAP-L7-huIgKLC
(SEQ ID NO: 606)
EIVLTQSPGTLSLSPGERATLSCRASQSVSTSAYSYMHWYQQKPGQAPRLLTYLASNLESGIP
DRFSGSGSGTDFTLTISRLEPEDFAVYYCQQSRELPYTEGQGTKLEIKRTVAAPSVFIFPPSDEQLKSGTASVVC
LLNNFYPREAKVQWKVDNALQSGNSQESVTEQDSKDSTYSLSSTLTLSKADYEKHKVYACEVTHQGLSSPVTKSF
NRGEC

[0405] Expected Cleavage Products from uPA/Matriptase Cleavage of P24912158:

1) FAP-H6L7-huIgG1(L234A, L235A, P329A)-delK-
GGSGGSGGSGGS-IL-15(S162A)-GGGSGGGSGR/
SDNQGGGSGGGSG-IL-15Rα(T2A)/FAP-L7-huIgKLC
(product from complete cleavage)
Chains 1 and 2: FAP-H6L7-huIgG1(L234A, L235A,
P329A)-delK-GGSGGSGGSGGS-IL-15(S162A)-GGGSGGGSGR
(SEQ ID NO: 607)
QVQLVQSGAEVKKPGASVKVSCKASGYTFTENIIHWVRQAPGQGLEWMGW
IHPGSGSIKYAQKLQGRVTMTTDTSTSTAYMELRSLRSDDTAVYYCARHG
GTGRGAMDYWGQGTLVTVSSASTKGPSVFPLAPSSKSTSGGTAALGCLVK
DYFPEPVTVSWNSGALTSGVHTFPAVLQSSGLYSLSSVVTVPSSSLGTQT
YICNVNHKPSNTKVDKKVEPKSCDKTHTCPPCPAPEAAGGPSVFLFPPKP
KDTLMISRTPEVTCVVVDVSHEDPEVKFNWYVDGVEVHNAKTKPREEQYN
STYRVVSVLTVLHQDWLNGKEYKCKVSNKALAAPIEKTISKAKGQPREPQ
VYTLPPSRDELTKNQVSLTCLVKGFYPSDIAVEWESNGQPENNYKTTPPV
LDSDGSFFLYSKLTVDKSRWQQGNVFSCSVMHEALHNHYTQKSLSLSPGG
GSGGSGGSGGSNWVNVISDLKKIEDLIQSMHIDATLYTESDVHPSCKVTA
MKCELLELQVISLESGDASIHDTVENLIILANNSLSSNGNVTESGCKECE
ELEEKNIKEFLQSFVHIVQMFINTAGGGSGGGSGR
Chains 3 and 4: SDNQGGGSGGGSG-IL-15Rα(T2A)
(SEQ ID NO: 608)
SDNQGGGSGGGSGIACPPPMSVEHADIWVKSYSLYSRERYICNSGFKRKA
GTSSLTECVLNKATNVAHWTTPSLKCIRDPALVHQRPAPPS
Chains 5 and 6: FAP-L7-huIgKLC
(SEQ ID NO: 609)
EIVLTQSPGTLSLSPGERATLSCRASQSVSTSAYSYMHWYQQKPGQAPRL
LIYLASNLESGIPDRFSGSGSGTDFTLTISRLEPEDFAVYYCQQSRELPY
TEGQGTKLEIKRTVAAPSVFIFPPSDEQLKSGTASVVCLLNNFYPREAKV
QWKVDNALQSGNSQESVTEQDSKDSTYSLSSTLTLSKADYEKHKVYACEV
THQGLSSPVTKSFNRGEC
2) FAP-H6L7-huIgG1(L234A, L235A, P329A)-delK-
GGSGGSGGSGGS-IL-15(S162A)-GGGSGGGSGRSDNQGGGSGGGSG-
IL-15Rα(T2A)/FAP-H6L7-huIgG1(L234A, L235A,
P329A)-delK-GGSGGSGGSGGS-IL-15(S162A)-GGGSGGGSGR/
SDNQGGGSGGGSG-IL-15Rα(T2A)/FAP-L7-huIgKLC
(product from partial cleavage, active)
Chain 1: FAP-H6L7-huIgG1(L234A, L235A, P329A)-
delK-GGSGGSGGSGGS-IL-15(S162A)-
GGGSGGGSGRSDNQGGGSGGGSG-IL-15Rα(T2A)
(SEQ ID NO: 610)
QVQLVQSGAEVKKPGASVKVSCKASGYTFTENIIHWVRQAPGQGLEWMGW
IHPGSGSIKYAQKLQGRVTMTTDTSTSTAYMELRSLRSDDTAVYYCARHG
GTGRGAMDYWGQGTLVTVSSASTKGPSVFPLAPSSKSTSGGTAALGCLVK
DYFPEPVTVSWNSGALTSGVHTFPAVLQSSGLYSLSSVVTVPSSSLGTQT
YICNVNHKPSNTKVDKKVEPKSCDKTHTCPPCPAPEAAGGPSVFLFPPKP
KDTLMISRTPEVTCVVVDVSHEDPEVKFNWYVDGVEVHNAKTKPREEQYN
STYRVVSVLTVLHQDWLNGKEYKCKVSNKALAAPIEKTISKAKGQPREPQ
VYTLPPSRDELTKNQVSLTCLVKGFYPSDIAVEWESNGQPENNYKTTPPV
LDSDGSFFLYSKLTVDKSRWQQGNVFSCSVMHEALHNHYTQKSLSLSPGG
GSGGSGGSGGSNWVNVISDLKKIEDLIQSMHIDATLYTESDVHPSCKVTA
MKCFLLELQVISLESGDASIHDTVENLIILANNSLSSNGNVTESGCKECE
ELEEKNIKEFLQSFVHIVQMFINTAGGGSGGGSGRSDNQGGGSGGGSGIA
CPPPMSVEHADIWVKSYSLYSRERYICNSGFKRKAGTSSLTECVLNKATN
VAHWTTPSLKCIRDPALVHQRPAPPS
Chain 2: FAP-H6L7-huIgG1(L234A, L235A, P329A)-
delK-GGSGGSGGSGGS-IL-15(S162A)-GGGSGGGSGR
(SEQ ID NO: 611)
QVQLVQSGAEVKKPGASVKVSCKASGYTFTENIIHWVRQAPGQGLEWMGW
IHPGSGSIKYAQKLQGRVTMTTDTSTSTAYMELRSLRSDDTAVYYCARHG
GTGRGAMDYWGQGTLVTVSSASTKGPSVFPLAPSSKSTSGGTAALGCLVK
DYFPEPVTVSWNSGALTSGVHTFPAVLQSSGLYSLSSVVTVPSSSLGTQT
YICNVNHKPSNTKVDKKVEPKSCDKTHTCPPCPAPEAAGGPSVFLFPPKP
KDTLMISRTPEVTCVVVDVSHEDPEVKFNWYVDGVEVHNAKTKPREEQYN
STYRVVSVLTVLHQDWLNGKEYKCKVSNKALAAPIEKTISKAKGQPREPQ
VYTLPPSRDELTKNQVSLTCLVKGFYPSDIAVEWESNGQPENNYKTTPPV
LDSDGSFFLYSKLTVDKSRWQQGNVFSCSVMHEALHNHYTQKSLSLSPGG
GSGGSGGSGGSNWVNVISDLKKIEDLIQSMHIDATLYTESDVHPSCKVTA
MKCFLLELQVISLESGDASIHDTVENLIILANNSLSSNGNVTESGCKECE
ELEEKNIKEFLQSFVHIVQMFINTAGGGSGGGSGR
Chain 3: SDNQGGGSGGGSG-IL-15Rα(T2A)
(SEQ ID NO: 612)
SDNQGGGSGGGSGIACPPPMSVEHADIWVKSYSLYSRERYICNSGFKRKA
GTSSLTECVLNKATNVAHWTTPSLKCIRDPALVHQRPAPPS
Chain 4 and 5: FAP-L7-huIgKLC
(SEQ ID NO: 613)
EIVLTQSPGTLSLSPGERATLSCRASQSVSTSAYSYMHWYQQKPGQAPRL
LIYLASNLESGIPDRFSGSGSGTDFTLTISRLEPEDFAVYYCQQSRELPY
TEGQGTKLEIKRTVAAPSVFIFPPSDEQLKSGTASVVCLLNNFYPREAKV
QWKVDNALQSGNSQESVTEQDSKDSTYSLSSTLTLSKADYEKHKVYACEV
THQGLSSPVTKSFNRGEC

[0406] Having described embodiments of the invention with reference to the accompanying drawings, it is to be understood that the invention is not limited to the precise embodiments, and that various changes and modifications may be effected therein by those skilled in the art without departing from the scope or spirit of the invention as defined in the appended claims.

The application's sequence listing, which the Patent Office published only in electronic form, follows.

SEQUENCE LISTING (613 sequences)

SEQ ID NO: 1 - protein, 162 aa, Homo sapiens
MRISKPHLRSISIQCYLCLLLNSHFLTEAGIHVFILGCFSAGLPKTEANWVNVISDLKKIEDLIQSMHIDATLYTESDVHPSCKVTAMKCFLLELQVISLESGDASIHDTVENLIILANNSLSSNGNVTESGCKECEELEEKNIKEFLQSFVHIVQMFINTS

SEQ ID NO: 2 - protein, 114 aa, Homo sapiens
NWVNVISDLKKIEDLIQSMHIDATLYTESDVHPSCKVTAMKCFLLELQVISLESGDASIHDTVENLIILANNSLSSNGNVTESGCKECEELEEKNIKEFLQSFVHIVQMFINTS

SEQ ID NO: 3 - protein, 114 aa, Artificial Sequence
  Made in Lab - modified IL-15
NWVNVISDLKKIEDLIQSMHIDATLYTESDVHPSCKVTAMKCFLLELQVISLESGDASIHDTVENLIILANNSLSSNGNVTESGCKECEELEEKNIKEFLQSFVHIVQMFINTA

SEQ ID NO: 4 - protein, 266 aa, Homo sapiens
MAPRRARGCRTLGLPALLLLLLLRPPATRGITCPPPMSVEHADIWVKSYSLYSRERYICNSGFKRKAGTSSLTECVLNKATNVAHWTTPSLKCIRDPALVHQRPAPPSTVTTAGVTPQPESLSPSGKEPAASSPSSNNTAATTAAIVPGSQLMPSKSPSTGTTEISSHESSHGTPSQTTAKNWELTASASHQPPGVYPQGHSDTTVAISTSTVLLCGLSAVSLLACYLKSRQTPPLASVEMEAMEALPVTWGTSSRDEDLENCSHH

SEQ ID NO: 5 - protein, 175 aa, Homo sapiens
ITCPPPMSVEHADIWVKSYSLYSRERYICNSGFKRKAGTSSLTECVLNKATNVAHWTTPSLKCIRDPALVHQRPAPPSTVTTAGVTPQPESLSPSGKEPAASSPSSNNTAATTAAIVPGSQLMPSKSPSTGTTEISSHESSHGTPSQTTAKNWELTASASHQPPGVYPQGHSDTT

SEQ ID NO: 6 - protein, 78 aa, Homo sapiens
ITCPPPMSVEHADIWVKSYSLYSRERYICNSGFKRKAGTSSLTECVLNKATNVAHWTTPSLKCIRDPALVHQRPAPPS

SEQ ID NO: 7 - protein, 65 aa, Homo sapiens
ITCPPPMSVEHADIWVKSYSLYSRERYICNSGFKRKAGTSSLTECVLNKATNVAHWTTPSLKCIR

SEQ ID NO: 8 - protein, 232 aa, Homo sapiens
EPKSSDKTHTCPPCPAPELLGGPSVFLFPPKPKDTLMISRTPEVTCVVVDVSHEDPEVKFNWYVDGVEVHNAKTKPREEQYNSTYRVVSVLTVLHQDWLNGKEYKCKVSNKALPAPIEKTISKAKGQPREPQVYTLPPSREEMTKNQVSLTCLVKGFYPSDIAVEWESNGQPENNYKTTPPVLDSDGSFFLYSKLTVDKSRWQQGNVFSCSVMHEALHNHYTQKSLSLSPGK

SEQ ID NO: 9 - protein, 226 aa, Homo sapiens
KTHTCPPCPAPELLGGPSVFLFPPKPKDTLMISRTPEVTCVVVDVSHEDPEVKFNWYVDGVEVHNAKTKPREEQYNSTYRVVSVLTVLHQDWLNGKEYKCKVSNKALPAPIEKTISKAKGQPREPQVYTLPPSREEMTKNQVSLTCLVKGFYPSDIAVEWESNGQPENNYKTTPPVLDSDGSFFLYSKLTVDKSRWQQGNVFSCSVMHEALHNHYTQKSLSLSPGK

SEQ ID NO: 10 - protein, 232 aa, Artificial Sequence
  Made in Lab - Modified human IgG1 Fc
EPKSSDKTHTCPPCPAPEAAGGPSVFLFPPKPKDTLYITREPEVTCVVVDVSHEDPEVKFNWYVDGVEVHNAKTKPREEQYNSTYRVVSVLTVLHQDWLNGKEYKCKVSNKALAAPIEKTISKAKGQPREPQVYTLPPSREEMTKNQVSLTCLVKGFYPSDIAVEWESNGQPENNYKTTPPVLDSDGSFFLYSKLTVDKSRWQQGNVFSCSVMHEALHNHYTQKSLSLSPGK

SEQ ID NO: 11 - protein, 232 aa, Homo sapiens; identical to SEQ ID NO: 8

SEQ ID NO: 12 - protein, 207 aa, Artificial Sequence
  Made in lab - ILR fusion protein construct
NWVNVISDLKKIEDLIQSMHIDATLYTESDVHPSCKVTAMKCFLLELQVISLESGDASIHDTVENLIILANNSLSSNGNVTESGCKECEELEEKNIKEFLQSFVHIVQMFINTSGGSGGSGGSGGSGGSITCPPPMSVEHADIWVKSYSLYSRERYICNSGFKRKAGTSSLTECVLNKATNVAHWTTPSLKCIRDPALVHQRPAPPS

SEQ ID NO: 13 - protein, 207 aa, Artificial Sequence
  Made in lab - ILR fusion protein construct
NWVNVISDLKKIEDLIQSMHIDATLYTESDVHPSCKVTAMKCFLLELQVISCESGDASIHDTVENLIILANNSLSSNGNVTESGCKECEELEEKNIKEFLQSFVHIVQMFINTSGGSGGSGGSGGSGGSITCPPPMSVEHADIWVKSYSLYSRERYICNSGFKRKAGTCSLTECVLNKATNVAHWTTPSLKCIRDPALVHQRPAPPS

SEQ ID NO: 14 - protein, 214 aa, Artificial Sequence
  Made in lab - ILR fusion protein construct
NWVNVISDLKKIEDLIQSMHIDATLYTESDVHPSCKVTAMKCFLLELQVISLESGDASIHDTVENLIILANNSLSSNGNVTESGCKECEELEEKNIKEFLQSFVHIVQMFINTSGGSGGSEPKSSDKTHTGGSGGSITCPPPMSVEHADIWVKSYSLYSRERYICNSGFKRKAGTSSLTECVLNKATNVAHWTTPSLKCIRDPALVHQRPAPPS

SEQ ID NO: 15 - protein, 218 aa, Artificial Sequence
  Made in lab - ILR fusion protein construct
NWVNVISDLKKIEDLIQSMHIDATLYTESDVHPSCKVTAMKCFLLELQVISLESGDASIHDTVENLIILANNSLSSNGNVTESGCKECEELEEKNIKEFLQSFVHIVQMFINTSGGSGGSEPKSSDKTHTGGSGGSGGGSITCPPPMSVEHADIWVKSYSLYSRERYICNSGFKRKAGTSSLTECVLNKATNVAHWTTPSLKCIRDPALVHQRPAPPS

SEQ ID NO: 16 - protein, 218 aa, Artificial Sequence
  Made in lab - ILR fusion protein construct
NWVNVISDLKKIEDLIQSMHIDATLYTESDVHPSCKVTAMKCFLLELQVISLESGDASIHDTVENLIILANNSLSSNGNVTESGCKECEELEEKNIKEFLQSFVHIVQMFINTSGGSGGSGGSGGSGGSITCPPPMSVEHADIWVKSYSLYSRERYICNSGFKRKAGTSSLTECVLNKATNVAHWTTPSLKCIRDPALVHQRPAPPSGGGGSHHHHHH

SEQ ID NO: 17 - protein, 444 aa, Artificial Sequence
  Made in lab - Fc-ILR fusion protein construct
NWVNVISDLKKIEDLIQSMHIDATLYTESDVHPSCKVTAMKCFLLELQVISLESGDASIHDTVENLIILANNSLSSNGNVTESGCKECEELEEKNIKEFLQSFVHIVQMFINTSGGSGGSGGSGGSGGSITCPPPMSVEHADIWVKSYSLYSRERYICNSGFKRKAGTSSLTECVLNKATNVAHWTTPSLKCIRDPALVHQRPAPPSGGGGSEPKSSDKTHTCPPCPAPELLGGPSVFLFPPKPKDTLMISRTPEVTCVVVDVSHEDPEVKFNWYVDGVEVHNAKTKPREEQYNSTYRVVSVLTVLHQDWLNGKEYKCKVSNKALPAPIEKTISKAKGQPREPQVYTLPPSREEMTKNQVSLTCLVKGFYPSDIAVEWESNGQPENNYKTTPPVLDSDGSFFLYSKLTVDKSRWQQGNVFSCSVMHEALHNHYTQKSLSLSPGK

SEQ ID NO: 18 - protein, 451 aa, Artificial Sequence
  Made in lab - Fc-ILR fusion protein construct
EPKSSDKTHTCPPCPAPELLGGPSVFLFPPKPKDTLMISRTPEVTCVVVDVSHEDPEVKFNWYVDGVEVHNAKTKPREEQYNSTYRVVSVLTVLHQDWLNGKEYKCKVSNKALPAPIEKTISKAKGQPREPQVYTLPPSREEMTKNQVSLTCLVKGFYPSDIAVEWESNGQPENNYKTTPPVLDSDGSFFLYSKLTVDKSRWQQGNVFSCSVMHEALHNHYTQKSLSLSPGKGGGSKTHTGGGSNWVNVISDLKKIEDLIQSMHIDATLYTESDVHPSCKVTAMKCFLLELQVISLESGDASIHDTVENLIILANNSLSSNGNVTESGCKECEELEEKNIKEFLQSFVHIVQMFINTSGGSGGSGGSGGSGGSITCPPPMSVEHADIWVKSYSLYSRERYICNSGFKRKAGTSSLTECVLNKATNVAHWTTPSLKCIRDPALVHQRPAPPS

SEQ ID NO: 19 - protein, 450 aa, Artificial Sequence
  Made in lab - Fc-ILR fusion protein construct
EPKSSDKTHTCPPCPAPELLGGPSVFLFPPKPKDTLMISRTPEVTCVVVDVSHEDPEVKFNWYVDGVEVHNAKTKPREEQYNSTYRVVSVLTVLHQDWLNGKEYKCKVSNKALPAPIEKTISKAKGQPREPQVYTLPPSREEMTKNQVSLTCLVKGFYPSDIAVEWESNGQPENNYKTTPPVLDSDGSFFLYSKLTVDKSRWQQGNVFSCSVMHEALHNHYTQKSLSLSPGKGGGSKTHTGGGSNWVNVISDLKKIEDLIQSMHIDATLYTESDVHPSCKVTAMKCFLLELQVISLESGDASIHDTVENLIILANNSLSSNGNVTESGCKECEELEEKNIKEFLQSFVHIVQMFINTSGGSGGSEPKSSDKTHTGGSGGSITCPPPMSVEHADIWVKSYSLYSRERYICNSGFKRKAGTSSLTECVLNKATNVAHWTTPSLKCIRDPALV

SEQ ID NO: 20 - protein, 443 aa, Artificial Sequence
  Made in lab - Fc-ILR fusion protein construct
EPKSSDKTHTCPPCPAPELLGGPSVFLFPPKPKDTLMISRTPEVTCVVVDVSHEDPEVKFNWYVDGVEVHNAKTKPREEQYNSTYRVVSVLTVLHQDWLNGKEYKCKVSNKALPAPIEKTISKAKGQPREPQVYTLPPSREEMTKNQVSLTCLVKGFYPSDIAVEWESNGQPENNYKTTPPVLDSDGSFFLYSKLTVDKSRWQQGNVFSCSVMHEALHNHYTQKSLSLSPGKGGGSNWVNVISDLKKIEDLIQSMHIDATLYTESDVHPSCKVTAMKCFLLELQVISLESGDASIHDTVENLIILANNSLSSNGNVTESGCKECEELEEKNIKEFLQSFVHIVQMFINTSGGSGGSGGSGGSGGSITCPPPMSVEHADIWVKSYSLYSRERYICNSGFKRKAGTSSLTECVLNKATNVAHWTTPSLKCIRDPALVHQRPAPPS

SEQ ID NO: 21 - protein, 450 aa, Artificial Sequence
  Made in lab - Fc-ILR fusion protein construct
EPKSSDKTHTCPPCPAPELLGGPSVFLFPPKPKDTLMISRTPEVTCVVVDVSHEDPEVKFNWYVDGVEVHNAKTKPREEQYNSTYRVVSVLTVLHQDWLNGKEYKCKVSNKALPAPIEKTISKAKGQPREPQVYTLPPSREEMTKNQVSLTCLVKGFYPSDIAVEWESNGQPENNYKTTPPVLDSDGSFFLYSKLTVDKSRWQQGNVFSCSVMHEALHNHYTQKSLSLSPGKGGGSNWVNVISDLKKIEDLIQSMHIDATLYTESDVHPSCKVTAMKCFLLELQVISLESGDASIHDTVENLIILANNSLSSNGNVTESGCKECEELEEKNIKEFLQSFVHIVQMFINTSGGSGGSEPKSSDKTHTGGSGGSITCPPPMSVEHADIWVKSYSLYSRERYICNSGFKRKAGTSSLTECVLNKATNVAHWTTPSLKCIRDPALVHQRPAPPS

SEQ ID NO: 22 - protein, 462 aa, Artificial Sequence
  Made in lab - Fc-ILR fusion protein construct
EPKSSDKTHTCPPCPAPELLGGPSVFLFPPKPKDTLMISRTPEVTCVVVDVSHEDPEVKFNWYVDGVEVHNAKTKPREEQYNSTYRVVSVLTVLHQDWLNGKEYKCKVSNKALPAPIEKTISKAKGQPREPQVYTLPPSREEMTKNQVSLTCLVKGFYPSDIAVEWESNGQPENNYKTTPPVLDSDGSFFLYSKLTVDKSRWQQGNVFSCSVMHEALHNHYTQKSLSLSPGKGGGSKTHTGGGSNWVNVISDLKKIEDLIQSMHIDATLYTESDVHPSCKVTAMKCFLLELQVISLESGDASIHDTVENLIILANNSLSSNGNVTESGCKECEELEEKNIKEFLQSFVHIVQMFINTSGGSGGSEPKSSDKTHTGGSGGSGGGSITCPPPMSVEHADIWVKSYSLYSRERYICNSGFKRKAGTSSLTECVLNKATNVAHWTTPSLKCIRDPALVHQRPAPPS

SEQ ID NO: 23 - protein, 444 aa, Artificial Sequence
  Made in lab - Fc-ILR fusion protein construct
NWVNVISDLKKIEDLIQSMHIDATLYTESDVHPSCKVTAMKCFLLELQVISLESGDASIHDTVENLIILANNSLSSNGNVTESGCKECEELEEKNIKEFLQSFVHIVQMFINTAGGSGGSGGSGGSGGSITCPPPMSVEHADIWVKSYSLYSRERYICNSGFKRKAGTSSLTECVLNKATNVAHWTTPSLKCIRDPALVHQRPAPPSGGGGSEPKSSDKTHTCPPCPAPELLGGPSVFLFPPKPKDTLMISRTPEVTCVVVDVSHEDPEVKFNWYVDGVEVHNAKTKPREEQYNSTYRVVSVLTVLHQDWLNGKEYKCKVSNKALPAPIEKTISKAKGQPREPQVYTLPPSREEMTKNQVSLTCLVKGFYPSDIAVEWESNGQPENNYKTTPPVLDSDGSFFLYSKLTVDKSRWQQGNVFSCSVMHEALHNHYTQKSLSLSPGK

SEQ ID NO: 24 - protein, 451 aa, Artificial Sequence
  Made in lab - Fc-ILR fusion protein construct
EPKSSDKTHTCPPCPAPELLGGPSVFLFPPKPKDTLMISRTPEVTCVVVDVSHEDPEVKFNWYVDGVEVHNAKTKPREEQYNSTYRVVSVLTVLHQDWLNGKEYKCKVSNKALPAPIEKTISKAKGQPREPQVYTLPPSREEMTKNQVSLTCLVKGFYPSDIAVEWESNGQPENNYKTTPPVLDSDGSFFLYSKLTVDKSRWQQGNVFSCSVMHEALHNHYTQKSLSLSPGKGGGSKTHTGGGSNWVNVISDLKKIEDLIQSMHIDATLYTESDVHPSCKVTAMKCFLLELQVISLESGDASIHDTVENLIILANNSLSSNGNVTESGCKECEELEEKNIKEFLQSFVHIVQMFINTAGGSGGSGGSGGSGGSITCPPPMSVEHADIWVKSYSLYSRERYICNSGFKRKAGTSSLTECVLNKATNVAHWTTPSLKCIRDPALVHQRPAPPS

SEQ ID NO: 25 - protein, 458 aa, Artificial Sequence
  Made in lab - Fc-ILR fusion protein construct
EPKSSDKTHTCPPCPAPELLGGPSVFLFPPKPKDTLMISRTPEVTCVVVDVSHEDPEVKFNWYVDGVEVHNAKTKPREEQYNSTYRVVSVLTVLHQDWLNGKEYKCKVSNKALPAPIEKTISKAKGQPREPQVYTLPPSREEMTKNQVSLTCLVKGFYPSDIAVEWESNGQPENNYKTTPPVLDSDGSFFLYSKLTVDKSRWQQGNVFSCSVMHEALHNHYTQKSLSLSPGKGGGSKTHTGGGSNWVNVISDLKKIEDLIQSMHIDATLYTESDVHPSCKVTAMKCFLLELQVISLESGDASIHDTVENLIILANNSLSSNGNVTESGCKECEELEEKNIKEFLQSFVHIVQMFINTAGGSGGSEPKSSDKTHTGGSGGSITCPPPMSVEHADIWVKSYSLYSRERYICNSGFKRKAGTSSLTECVLNKATNVAHWTTPSLKCIRDPALVHQRPAPPS

SEQ ID NO: 26 - protein, 450 aa, Artificial Sequence
  Made in lab - Fc-ILR fusion protein construct
EPKSSDKTHTCPPCPAPELLGGPSVFLFPPKPKDTLMISRTPEVTCVVVDVSHEDPEVKFNWYVDGVEVHNAKTKPREEQYNSTYRVVSVLTVLHQDWLNGKEYKCKVSNKALPAPIEKTISKAKGQPREPQVYTLPPSREEMTKNQVSLTCLVKGFYPSDIAVEWESNGQPENNYKTTPPVLDSDGSFFLYSKLTVDKSRWQQGNVFSCSVMHEALHNHYTQKSLSLSPGKGSENLYFQGGSNWVNVISDLKKIEDLIQSMHIDATLYTESDVHPSCKVTAMKCFLLELQVISLESGDASIHDTVENLIILANNSLSSNGNVTESGCKECEELEEKNIKEFLQSFVHIVQMFINTSGGSGGSGGSGGSGGSITCPPPMSVEHADIWVKSYSLYSRERYICNSGFKRKAGTSSLTECVLNKATNVAHWTTPSLKCIRDPALVHQRPAPPS

SEQ ID NO: 27 - protein, 240 aa, Artificial Sequence
  Made in lab - Fc-ILR fusion protein construct
EPKSSDKTHTCPPCPAPELLGGPSVFLFPPKPKDTLMISRTPEVTCVVVDVSHEDPEVKFNWYVDGVEVHNAKTKPREEQYNSTYRVVSVLTVLHQDWLNGKEYKCKVSNKALPAPIEKTISKAKGQPREPQVYTLPPSREEMTKNQVSLTCLVKGFYPSDIAVEWESNGQPENNYKTTPPVLDSDGSFFLYSKLTVDKSRWQQGNVFSCSVMHEALHNHYTQKSLSLSPGKGSENLYFQ

SEQ ID NO: 28 - protein, 210 aa, Artificial Sequence
  Made in lab - ILR fusion protein construct
GGSNWVNVISDLKKIEDLIQSMHIDATLYTESDVHPSCKVTAMKCFLLELQVISLESGDASIHDTVENLIILANNSLSSNGNVTESGCKECEELEEKNIKEFLQSFVHIVQMFINTSGGSGGSGGSGGSGGSITCPPPMSVEHADIWVKSYSLYSRERYICNSGFKRKAGTSSLTECVLNKATNVAHWTTPSLKCIRDPALVHQRPAPPS

SEQ ID NO: 29 - protein, 450 aa, Artificial Sequence; identical to SEQ ID NO: 26
  Made in lab - Fc-ILR fusion protein construct

SEQ ID NO: 30 - protein, 240 aa, Artificial Sequence; identical to SEQ ID NO: 27
  Made in lab - Fc-ILR fusion protein construct

SEQ ID NO: 31 - protein, 210 aa, Artificial Sequence; identical to SEQ ID NO: 28
  Made in lab - ILR fusion protein construct

SEQ ID NO: 32 - protein, 456 aa, Artificial Sequence
  Made in lab - Fc-ILR fusion protein construct
EPKSSDKTHTCPPCPAPELLGGPSVFLFPPKPKDTLMISRTPEVTCVVVDVSHEDPEVKFNWYVDGVEVHNAKTKPREEQYNSTYRVVSVLTVLHQDWLNGKEYKCKVSNKALPAPIEKTISKAKGQPREPQVYTLPPSREEMTKNQVSLTCLVKGFYPSDIAVEWESNGQPENNYKTTPPVLDSDGSFFLYSKLTVDKSRWQQGNVFSCSVMHEALHNHYTQKSLSLSPGKGGGGSENLYFQGGGGGSNWVNVISDLKKIEDLIQSMHIDATLYTESDVHPSCKVTAMKCFLLELQVISLESGDASIHDTVENLIILANNSLSSNGNVTESGCKECEELEEKNIKEFLQSFVHIVQMFINTSGGSGGSGGSGGSGGSITCPPPMSVEHADIWVKSYSLYSRERYICNSGFKRKAGTSSLTECVLNKATNVAHWTTPSLKCIRDPALVHQRPAPPS

SEQ ID NO: 33 - protein, 243 aa, Artificial Sequence
  Made in lab - Fc-ILR fusion protein construct
EPKSSDKTHTCPPCPAPELLGGPSVFLFPPKPKDTLMISRTPEVTCVVVDVSHEDPEVKFNWYVDGVEVHNAKTKPREEQYNSTYRVVSVLTVLHQDWLNGKEYKCKVSNKALPAPIEKTISKAKGQPREPQVYTLPPSREEMTKNQVSLTCLVKGFYPSDIAVEWESNGQPENNYKTTPPVLDSDGSFFLYSKLTVDKSRWQQGNVFSCSVMHEALHNHYTQKSLSLSPGKGGGGSENLYFQ

SEQ ID NO: 34 - protein, 213 aa, Artificial Sequence
  Made in lab - ILR fusion protein construct
GGGGGSNWVNVISDLKKIEDLIQSMHIDATLYTESDVHPSCKVTAMKCFLLELQVISLESGDASIHDTVENLIILANNSLSSNGNVTESGCKECEELEEKNIKEFLQSFVHIVQMFINTSGGSGGSGGSGGSGGSITCPPPMSVEHADIWVKSYSLYSRERYICNSGFKRKAGTSSLTECVLNKATNVAHWTTPSLKCIRDPALVHQRPAPPS

SEQ ID NO: 35 - protein, 456 aa, Artificial Sequence; identical to SEQ ID NO: 32
  Made in lab - Fc-ILR fusion protein construct

SEQ ID NO: 36 - protein, 243 aa, Artificial Sequence; identical to SEQ ID NO: 33
  Made in lab - Fc-ILR fusion protein construct

SEQ ID NO: 37 - protein, 213 aa, Artificial Sequence; identical to SEQ ID NO: 34
  Made in lab - ILR fusion protein construct

SEQ ID NO: 38 - protein, 218 aa, Artificial Sequence
  Made in lab - ILR fusion protein construct
NWVNVISDLKKIEDLIQSMHIDATLYTESDVHPSCKVTAMKCFLLELQVISLESGDASIHDTVENLIILANNSLSSNGNVTESGCKECEELEEKNIKEFLQSFVHIVQMFINTAGGSGGSGGSGGSGGSITCPPPMSVEHADIWVKSYSLYSRERYICNSGFKRKAGTSSLTECVLNKATNVAHWTTPSLKCIRDPALVHQRPAPPSGGGGSHHHHHH

SEQ ID NO: 39 - protein, 229 aa, Artificial Sequence
  Made in lab - ILR fusion protein construct
NWVNVISDLKKIEDLIQSMHIDATLYTESDVHPSCKVTAMKCFLLELQVISLESGDASIHDTVENLIILANNSLSSNGNVTESGCKECEELEEKNIKEFLQSFVHIVQMFINTSGGSGGSEPKSSDKTHTGGSGGSGGGSITCPPPMSVEHADIWVKSYSLYSRERYICNSGFKRKAGTSSLTECVLNKATNVAHWTTPSLKCIRDPALVHQRPAPPSGGGGSHHHHHH

SEQ ID NO: 40 - protein, 229 aa, Artificial Sequence
  Made in lab - ILR fusion protein construct
NWVNVISDLKKIEDLIQSMHIDATLYTESDVHPSCKVTAMKCFLLELQVISLESGDASIHDTVENLIILANNSLSSNGNVTESGCKECEELEEKNIKEFLQSFVHIVQMFINTAGGSGGSEPKSSDKTHTGGSGGSGGGSITCPPPMSVEHADIWVKSYSLYSRERYICNSGFKRKAGTSSLTECVLNKATNVAHWTTPSLKCIRDPALVHQRPAPPSGGGGSHHHHHH

SEQ ID NO: 41 - protein, 440 aa, Artificial Sequence
  Made in lab - Fc-ILR fusion protein construct
EPKSSDKTHTCPPCPAPELLGGPSVFLFPPKPKDTLMISRTPEVTCVVVDVSHEDPEVKFNWYVDGVEVHNAKTKPREEQYNSTYRVVSVLTVLHQDWLNGKEYKCKVSNKALPAPIEKTISKAKGQPREPQVYTLPPSREEMTKNQVSLTCLVKGFYPSDIAVEWESNGQPENNYKTTPPVLDSDGSFFLYSKLTVDKSRWQQGNVFSCSVMHEALHNHYTQKSLSLSPGKGNWVNVISDLKKIEDLIQSMHIDATLYTESDVHPSCKVTAMKCFLLELQVISLESGDASIHDTVENLIILANNSLSSNGNVTESGCKECEELEEKNIKEFLQSFVHIVQMFINTAGGSGGSGGSGGSGGSITCPPPMSVEHADIWVKSYSLYSRERYICNSGFKRKAGTSSLTECVLNKATNVAHWTTPSLKCIRDPALVHQRPAPPS

SEQ ID NO: 42 - protein, 451 aa, Artificial Sequence
  Made in lab - Fc-ILR fusion protein construct
EPKSSDKTHTCPPCPAPELLGGPSVFLFPPKPKDTLMISRTPEVTCVVVDVSHEDPEVKFNWYVDGVEVHNAKTKPREEQYNSTYRVVSVLTVLHQDWLNGKEYKCKVSNKALPAPIEKTISKAKGQPREPQVYTLPPSREEMTKNQVSLTCLVKGFYPSDIAVEWESNGQPENNYKTTPPVLDSDGSFFLYSKLTVDKSRWQQGNVFSCSVMHEALHNHYTQKSLSLSPGKGNWVNVISDLKKIEDLIQSMHIDATLYTESDVHPSCKVTAMKCFLLELQVISLESGDASIHDTVENLIILANNSLSSNGNVTESGCKECEELEEKNIKEFLQSFVHIVQMFINTAGGSGGSEPKSSDKTHTGGSGGSGGGSITCPPPMSVEHADIWVKSYSLYSRERYICNSGFKRKAGTSSLTECVLNKATNVAHWTTPSLKCIRDPALVHQRPAPPS

SEQ ID NO: 43 - protein, 460 aa, Artificial Sequence
  Made in lab - Fc-ILR fusion protein construct
EPKSSDKTHTCPPCPAPELLGGPSVFLFPPKPKDTLMISRTPEVTCVVVDVSHEDPEVKFNWYVDGVEVHNAKTKPREEQYNSTYRVVSVLTVLHQDWLNGKEYKCKVSNKALPAPIEKTISKAKGQPREPQVYTLPPSREEMTKNQVSLTCLVKGFYPSDIAVEWESNGQPENNYKTTPPVLDSDGSFFLYSKLTVDKSRWQQGNVFSCSVMHEALHNHYTQKSLSLSPGKGSGGGGSENLYFQGGGGGSGSNWVNVISDLKKIEDLIQSMHIDATLYTESDVHPSCKVTAMKCFLLELQVISLESGDASIHDTVENLIILANNSLSSNGNVTESGCKECEELEEKNIKEFLQSFVHIVQMFINTSGGSGGSGGSGGSGGSITCPPPMSVEHADIWVKSYSLYSRERYICNSGFKRKAGTSSLTECVLNKATNVAHWTTPSLKCIRDPALVHQRPAPPS

SEQ ID NO: 44 - protein, 245 aa, Artificial Sequence
  Made in lab - Fc-ILR fusion protein construct
EPKSSDKTHTCPPCPAPELLGGPSVFLFPPKPKDTLMISRTPEVTCVVVDVSHEDPEVKFNWYVDGVEVHNAKTKPREEQYNSTYRVVSVLTVLHQDWLNGKEYKCKVSNKALPAPIEKTISKAKGQPREPQVYTLPPSREEMTKNQVSLTCLVKGFYPSDIAVEWESNGQPENNYKTTPPVLDSDGSFFLYSKLTVDKSRWQQGNVFSCSVMHEALHNHYTQKSLSLSPGKGSGGGGSENLYFQ

SEQ ID NO: 45 - protein, 215 aa, Artificial Sequence
  Made in lab - ILR fusion protein construct
GGGGGSGSNWVNVISDLKKIEDLIQSMHIDATLYTESDVHPSCKVTAMKCFLLELQVISLESGDASIHDTVENLIILANNSLSSNGNVTESGCKECEELEEKNIKEFLQSFVHIVQMFINTSGGSGGSGGSGGSGGSITCPPPMSVEHADIWVKSYSLYSRERYICNSGFKRKAGTSSLTECVLNKATNVAHWTTPSLKCIRDPALVHQRPAPPS

SEQ ID NO: 46 - protein, 460 aa, Artificial Sequence; identical to SEQ ID NO: 43
  Made in lab - Fc-ILR fusion protein construct

SEQ ID NO: 47 - protein, 245 aa, Artificial Sequence; identical to SEQ ID NO: 44
  Made in lab - Fc-ILR fusion protein construct

SEQ ID NO: 48 - protein, 215 aa, Artificial Sequence; identical to SEQ ID NO: 45
  Made in lab - ILR fusion protein construct

SEQ ID NO: 49 - protein, 464 aa, Artificial Sequence
  Made in lab - Fc-ILR fusion protein construct
EPKSSDKTHTCPPCPAPELLGGPSVFLFPPKPKDTLMISRTPEVTCVVVDVSHEDPEVKFNWYVDGVEVHNAKTKPREEQYNSTYRVVSVLTVLHQDWLNGKEYKCKVSNKALPAPIEKTISKAKGQPREPQVYTLPPSREEMTKNQVSLTCLVKGFYPSDIAVEWESNGQPENNYKTTPPVLDSDGSFFLYSKLTVDKSRWQQGNVFSCSVMHEALHNHYTQKSLSLSPGKGGGSGGGGSENLYFQGGGGGSGGGSNWVNVISDLKKIEDLIQSMHIDATLYTESDVHPSCKVTAMKCFLLELQVISLESGDASIHDTVENLIILANNSLSSNGNVTESGCKECEELEEKNIKEFLQSFVHIVQMFINTSGGSGGSGGSGGSGGSITCPPPMSVEHADIWVKSYSLYSRERYICNSGFKRKAGTSSLTECVLNKATNVAHWTTPSLKCIRDPALVHQRPAPPS

SEQ ID NO: 50 - protein, 247 aa, Artificial Sequence
  Made in lab - Fc-ILR fusion protein construct
EPKSSDKTHTCPPCPAPELLGGPSVFLFPPKPKDTLMISRTPEVTCVVVDVSHEDPEVKFNWYVDGVEVHNAKTKPREEQYNSTYRVVSVLTVLHQDWLNGKEYKCKVSNKALPAPIEKTISKAKGQPREPQVYTLPPSREEMTKNQVSLTCLVKGFYPSDIAVEWESNGQPENNYKTTPPVLDSDGSFFLYSKLTVDKSRWQQGNVFSCSVMHEALHNHYTQKSLSLSPGKGGGSGGGGSENLYFQ

SEQ ID NO: 51 - protein, 217 aa, Artificial Sequence
  Made in lab - ILR fusion protein construct
GGGGGSGGGSNWVNVISDLKKIEDLIQSMHIDATLYTESDVHPSCKVTAMKCFLLELQVISLESGDASIHDTVENLIILANNSLSSNGNVTESGCKECEELEEKNIKEFLQSFVHIVQMFINTSGGSGGSGGSGGSGGSITCPPPMSVEHADIWVKSYSLYSRERYICNSGFKRKAGTSSLTECVLNKATNVAHWTTPSLKCIRDPALVHQRPAPPS

SEQ ID NO: 52 - protein, 464 aa, Artificial Sequence; identical to SEQ ID NO: 49
  Made in lab - Fc-ILR fusion protein construct

SEQ ID NO: 53 - protein, 247 aa, Artificial Sequence; identical to SEQ ID NO: 50
  Made in lab - Fc-ILR fusion protein construct

SEQ ID NO: 54 - protein, 217 aa, Artificial Sequence; identical to SEQ ID NO: 51
  Made in lab - ILR fusion protein construct

SEQ ID NO: 55 - protein, 468 aa, Artificial Sequence
  Made in lab - Fc-ILR fusion protein construct
EPKSSDKTHTCPPCPAPELLGGPSVFLFPPKPKDTLMISRTPEVTCVVVDVSHEDPEVKFNWYVDGVEVHNAKTKPREEQYNSTYRVVSVLTVLHQDWLNGKEYKCKVSNKALPAPIEKTISKAKGQPREPQVYTLPPSREEMTKNQVSLTCLVKGFYPSDIAVEWESNGQPENNYKTTPPVLDSDGSFFLYSKLTVDKSRWQQGNVFSCSVMHEALHNHYTQKSLSLSPGKGSGGGSGGGGSENLYFQGGGGGSGGGSGSNWVNVISDLKKIEDLIQSMHIDATLYTESDVHPSCKVTAMKCFLLELQVISLESGDASIHDTVENLIILANNSLSSNGNVTESGCKECEELEEKNIKEFLQSFVHIVQMFINTSGGSGGSGGSGGSGGSITCPPPMSVEHADIWVKSYSLYSRERYICNSGFKRKAGTSSLTECVLNKATNVAHWTTPSLKCIRDPALVHQRPAPPS

SEQ ID NO: 56 - protein, 249 aa, Artificial Sequence
  Made in lab - Fc-ILR fusion protein construct
EPKSSDKTHTCPPCPAPELLGGPSVFLFPPKPKDTLMISRTPEVTCVVVDVSHEDPEVKFNWYVDGVEVHNAKTKPREEQYNSTYRVVSVLTVLHQDWLNGKEYKCKVSNKALPAPIEKTISKAKGQPREPQVYTLPPSREEMTKNQVSLTCLVKGFYPSDIAVEWESNGQPENNYKTTPPVLDSDGSFFLYSKLTVDKSRWQQGNVFSCSVMHEALHNHYTQKSLSLSPGKGSGGGSGGGGSENLYFQ

SEQ ID NO: 57 - protein, 219 aa, Artificial Sequence
  Made in lab - ILR fusion protein construct
GGGGGSGGGSGSNWVNVISDLKKIEDLIQSMHIDATLYTESDVHPSCKVTAMKCFLLELQVISLESGDASIHDTVENLIILANNSLSSNGNVTESGCKECEELEEKNIKEFLQSFVHIVQMFINTSGGSGGSGGSGGSGGSITCPPPMSVEHADIWVKSYSLYSRERYICNSGFKRKAGTSSLTECVLNKATNVAHWTTPSLKCIRDPALVHQRPAPPS

SEQ ID NO: 58 - protein, 468 aa, Artificial Sequence; identical to SEQ ID NO: 55
  Made in lab - Fc-ILR fusion protein construct

SEQ ID NO: 59 - protein, 249 aa, Artificial Sequence; identical to SEQ ID NO: 56
  Made in lab - Fc-ILR fusion protein construct

SEQ ID NO: 60 - protein, 219 aa, Artificial Sequence; identical to SEQ ID NO: 57
  Made in lab - ILR fusion protein construct

SEQ ID NO: 61 - protein, 472 aa, Artificial Sequence
  Made in lab - Fc-ILR fusion protein construct
EPKSSDKTHTCPPCPAPELLGGPSVFLFPPKPKDTLMISRTPEVTCVVVDVSHEDPEVKFNWYVDGVEVHNAKTKPREEQYNSTYRVVSVLTVLHQDWLNGKEYKCKVSNKALPAPIEKTISKAKGQPREPQVYTLPPSREEMTKNQVSLTCLVKGFYPSDIAVEWESNGQPENNYKTTPPVLDSDGSFFLYSKLTVDKSRWQQGNVFSCSVMHEALHNHYTQKSLSLSPGKGGGSGGGSGGGGSENLYFQGGGGGSGGGSGGGSNWVNVISDLKKIEDLIQSMHIDATLYTESDVHPSCKVTAMKCFLLELQVISLESGDASIHDTVENLIILANNSLSSNGNVTESGCKECEELEEKNIKEFLQSFVHIVQMFINTSGGSGGSGGSGGSGGSITCPPPMSVEHADIWVKSYSLYSRERYICNSGFKRKAGTSSLTECVLNKATNVAHWTTPSLKCIRDPALVHQRPAPPS

SEQ ID NO: 62 - protein, 251 aa, Artificial Sequence
  Made in lab - Fc-ILR fusion protein construct
EPKSSDKTHTCPPCPAPELLGGPSVFLFPPKPKDTLMISRTPEVTCVVVDVSHEDPEVKFNWYVDGVEVHNAKTKPREEQYNSTYRVVSVLTVLHQDWLNGKEYKCKVSNKALPAPIEKTISKAKGQPREPQVYTLPPSREEMTKNQVSLTCLVKGFYPSDIAVEWESNGQPENNYKTTPPVLDSDGSFFLYSKLTVDKSRWQQGNVFSCSVMHEALHNHYTQKSLSLSPGKGGGSGGGSGGGGSENLYFQ

SEQ ID NO: 63 - protein, 221 aa, Artificial Sequence
  Made in lab - ILR fusion protein construct
GGGGGSGGGSGGGSNWVNVISDLKKIEDLIQSMHIDATLYTESDVHPSCKVTAMKCFLLELQVISLESGDASIHDTVENLIILANNSLSSNGNVTESGCKECEELEEKNIKEFLQSFVHIVQMFINTSGGSGGSGGSGGSGGSITCPPPMSVEHADIWVKSYSLYSRERYICNSGFKRKAGTSSLTECVLNKATNVAHWTTPSLKCIRDPALVHQRPAPPS

SEQ ID NO: 64 - protein, 472 aa, Artificial Sequence; identical to SEQ ID NO: 61
  Made in lab - Fc-ILR fusion protein construct

SEQ ID NO: 65 - protein, 251 aa, Artificial Sequence; identical to SEQ ID NO: 62
  Made in lab - Fc-ILR fusion protein construct

SEQ ID NO: 66 - protein, 221 aa, Artificial Sequence; identical to SEQ ID NO: 63
  Made in lab - ILR fusion protein construct

SEQ ID NO: 67 - protein, 476 aa, Artificial Sequence
  Made in lab - Fc-ILR fusion protein construct
EPKSSDKTHTCPPCPAPELLGGPSVFLFPPKPKDTLMISRTPEVTCVVVDVSHEDPEVKFNWYVDGVEVHNAKTKPREEQYNSTYRVVSVLTVLHQDWLNGKEYKCKVSNKALPAPIEKTISKAKGQPREPQVYTLPPSREEMTKNQVSLTCLVKGFYPSDIAVEWESNGQPENNYKTTPPVLDSDGSFFLYSKLTVDKSRWQQGNVFSCSVMHEALHNHYTQKSLSLSPGKGSGGGSGGGSGGGGSENLYFQGGGGGSGGGSGGGSGSNWVNVISDLKKIEDLIQSMHIDATLYTESDVHPSCKVTAMKCFLLELQVISLESGDASIHDTVENLIILANNSLSSNGNVTESGCKECEELEEKNIKEFLQSFVHIVQMFINTSGGSGGSGGSGGSGGSITCPPPMSVEHADIWVKSYSLYSRERYICNSGFKRKAGTSSLTECVLNKATNVAHWTTPSLKCIRDPALVHQRPAPPS

SEQ ID NO: 68 - protein, 253 aa, Artificial Sequence
  Made in lab - Fc-ILR fusion protein construct
EPKSSDKTHTCPPCPAPELLGGPSVFLFPPKPKDTLMISRTPEVTCVVVDVSHEDPEVKFNWYVDGVEVHNAKTKPREEQYNSTYRVVSVLTVLHQDWLNGKEYKCKVSNKALPAPIEKTISKAKGQPREPQVYTLPPSREEMTKNQVSLTCLVKGFYPSDIAVEWESNGQPENNYKTTPPVLDSDGSFFLYSKLTVDKSRWQQGNVFSCSVMHEALHNHYTQKSLSLSPGKGSGGGSGGGSGGGGSENLYFQ

SEQ ID NO: 69 - protein, 223 aa, Artificial Sequence
  Made in lab - ILR fusion protein construct
GGGGGSGGGSGGGSGSNWVNVISDLKKIEDLIQSMHIDATLYTESDVHPSCKVTAMKCFLLELQVISLESGDASIHDTVENLIILANNSLSSNGNVTESGCKECEELEEKNIKEFLQSFVHIVQMFINTSGGSGGSGGSGGSGGSITCPPPMSVEHADIWVKSYSLYSRERYICNSGFKRKAGTSSLTECVLNKATNVAHWTTPSLKCIRDPALVHQRPAPPS

SEQ ID NO: 70 - protein, 476 aa, Artificial Sequence; identical to SEQ ID NO: 67
  Made in lab - Fc-ILR fusion protein construct

SEQ ID NO: 71 - protein, 253 aa, Artificial Sequence; identical to SEQ ID NO: 68
  Made in lab - Fc-ILR fusion protein construct

SEQ ID NO: 72 - protein, 223 aa, Artificial Sequence; identical to SEQ ID NO: 69
  Made in lab - ILR fusion protein construct

SEQ ID NO: 73 - protein, 455 aa, Artificial Sequence
  Made in lab - Fc-ILR fusion protein construct
NWVNVISDLKKIEDLIQSMHIDATLYTESDVHPSCKVTAMKCFLLELQVISLESGDASIHDTVENLIILANNSLSSNGNVTESGCKECEELEEKNIKEFLQSFVHIVQMFINTSGGSGGSEPKSSDKTHTGGSGGSGGGSITCPPPMSVEHADIWVKSYSLYSRERYICNSGFKRKAGTSSLTECVLNKATNVAHWTTPSLKCIRDPALVHQRPAPPSGGGGSEPKSSDKTHTCPPCPAPELLGGPSVFLFPPKPKDTLMISRTPEVTCVVVDVSHEDPEVKFNWYVDGVEVHNAKTKPREEQYNSTYRVVSVLTVLHQDWLNGKEYKCKVSNKALPAPIEKTISKAKGQPREPQVYTLPPSREEMTKNQVSLTCLVKGFYPSDIAVEWESNGQPENNYKTTPPVLDSDGSFFLYSKLTVDKSRWQQGNVFSCSVMHEALHNHYTQKSLSLSPGK

SEQ ID NO: 74 - protein, 433 aa, Artificial Sequence
  Made in lab - Fc-ILR fusion protein construct
NWVNVISDLKKIEDLIQSMHIDATLYTESDVHPSCKVTAMKCFLLELQVISLESGDASIHDTVENLIILANNSLSSNGNVTESGCKECEELEEKNIKEFLQSFVHIVQMFINTSGGSGGSGGSGGSGGSITCPPPMSVEHADIWVKSYSLYSRERYICNSGFKRKAGTSSLTECVLNKATNVAHWTTPSLKCIRDPALVHQRPAPPSKTHTCPPCPAPELLGGPSVFLFPPKPKDTLMISRTPEVTCVVVDVSHEDPEVKFNWYVDGVEVHNAKTKPREEQYNSTYRVVSVLTVLHQDWLNGKEYKCKVSNKALPAPIEKTISKAKGQPREPQVYTLPPSREEMTKNQVSLTCLVKGFYPSDIAVEWESNGQPENNYKTTPPVLDSDGSFFLYSKLTVDKSRWQQGNVFSCSVMHEALHNHYTQKSLSLSPGK

SEQ ID NO: 75 - protein, 444 aa, Artificial Sequence
  Made in lab - Fc-ILR fusion protein construct
NWVNVISDLKKIEDLIQSMHIDATLYTESDVHPSCKVTAMKCFLLELQVISLESGDASIHDTVENLIILANNSLSSNGNVTESGCKECEELEEKNIKEFLQSFVHIVQMFINTSGGSGGSEPKSSDKTHTGGSGGSGGGSITCPPPMSVEHADIWVKSYSLYSRERYICNSGFKRKAGTSSLTECVLNKATNVAHWTTPSLKCIRDPALVHQRPAPPSKTHTCPPCPAPELLGGPSVFLFPPKPKDTLMISRTPEVTCVVVDVSHEDPEVKFNWYVDGVEVHNAKTKPREEQYNSTYRVVSVLTVLHQDWLNGKEYKCKVSNKALPAPIEKTISKAKGQPREPQVYTLPPSREEMTKNQVSLTCLVKGFYPSDIAVEWESNGQPENNYKTTPPVLDSDGSFFLYSKLTVDKSRWQQGNVFSCSVMHEALHNHYTQKSLSLSPGK

SEQ ID NO: 76 - protein, 453 aa, Artificial Sequence
  Made in lab - Fc-ILR fusion protein construct
EPKSSDKTHTCPPCPAPEAAGGPSVFLFPPKPKDTLYITREPEVTCVVVDVSHEDPEVKFNWYVDGVEVHNAKTKPREEQYNSTYRVVSVLTVLHQDWLNGKEYKCKVSNKALAAPIEKTISKAKGQPREPQVYTLPPSREEMTKNQVSLTCLVKGFYPSDIAVEWESNGQPENNYKTTPPVLDSDGSFFLYSKLTVDKSRWQQGNVFSCSVMHEALHNHYTQKSLSLSPGKGSLGGSGRSANAGSNWVNVISDLKKIEDLIQSMHIDATLYTESDVHPSCKVTAMKCFLLELQVISLESGDASIHDTVENLIILANNSLSSNGNVTESGCKECEELEEKNIKEFLQSFVHIVQMFINTAGGSGGSGGSGGSGGSITCPPPMSVEHADIWVKSYSLYSRERYICNSGFKRKAGTSSLTECVLNKATNVAHWTTPSLKCIRDPALVHQRPAPPS

SEQ ID NO: 77 - protein, 240 aa, Artificial Sequence
  Made in lab - Fc-ILR fusion protein construct
EPKSSDKTHTCPPCPAPEAAGGPSVFLFPPKPKDTLYITREPEVTCVVVDVSHEDPEVKFNWYVDGVEVHNAKTKPREEQYNSTYRVVSVLTVLHQDWLNGKEYKCKVSNKALAAPIEKTISKAKGQPREPQVYTLPPSREEMTKNQVSLTCLVKGFYPSDIAVEWESNGQPENNYKTTPPVLDSDGSFFLYSKLTVDKSRWQQGNVFSCSVMHEALHNHYTQKSLSLSPGKGSLGGSGR

SEQ ID NO: 78 - protein, 213 aa, Artificial Sequence
  Made in lab - ILR fusion protein construct
SANAGSNWVNVISDLKKIEDLIQSMHIDATLYTESDVHPSCKVTAMKCFLLELQVISLESGDASIHDTVENLIILANNSLSSNGNVTESGCKECEELEEKNIKEFLQSFVHIVQMFINTAGGSGGSGGSGGSGGSITCPPPMSVEHADIWVKSYSLYSRERYICNSGFKRKAGTSSLTECVLNKATNVAHWTTPSLKCIRDPALVHQRPAPPS

SEQ ID NO: 79 - protein, 453 aa, Artificial Sequence; identical to SEQ ID NO: 76
  Made in lab - Fc-ILR fusion protein construct

SEQ ID NO: 80 - protein, 240 aa, Artificial Sequence; identical to SEQ ID NO: 77
  Made in lab - Fc-ILR fusion protein construct

SEQ ID NO: 81 - protein, 213 aa, Artificial Sequence; identical to SEQ ID NO: 78
  Made in lab - ILR fusion protein construct

SEQ ID NO: 82 - protein, 243 aa, Artificial Sequence
  Made in lab - Fc-ILR fusion protein construct
EPKSSDKTHTCPPCPAPEAAGGPSVFLFPPKPKDTLYITREPEVTCVVVDVSHEDPEVKFNWYVDGVEVHNAKTKPREEQYNSTYRVVSVLTVLHQDWLNGKEYKCKVSNKALAAPIEKTISKAKGQPREPQVYTLPPSREEMTKNQVSLTCLVKGFYPSDIAVEWESNGQPENNYKTTPPVLDSDGSFFLYSKLTVDKSRWQQGNVFSCSVMHEALHNHYTQKSLSLSPGKGSLGGSGRSAN

SEQ ID NO: 83 - protein, 210 aa, Artificial Sequence
  Made in lab - ILR fusion protein construct
AGSNWVNVISDLKKIEDLIQSMHIDATLYTESDVHPSCKVTAMKCFLLELQVISLESGDASIHDTVENLIILANNSLSSNGNVTESGCKECEELEEKNIKEFLQSFVHIVQMFINTAGGSGGSGGSGGSGGSITCPPPMSVEHADIWVKSYSLYSRERYICNSGFKRKAGTSSLTECVLNKATNVAHWTTPSLKCIRDPALVHQRPAPPS

SEQ ID NO: 84 - protein, 453 aa, Artificial Sequence; identical to SEQ ID NO: 76
  Made in lab - Fc-ILR fusion protein construct

SEQ ID NO: 85 - protein, 243 aa, Artificial Sequence; identical to SEQ ID NO: 82
  Made in lab - Fc-ILR fusion protein construct

SEQ ID NO: 86 - protein, 210 aa, Artificial Sequence; identical to SEQ ID NO: 83
  Made in lab - ILR fusion protein construct

SEQ ID NO: 87 - protein, 453 aa, Artificial Sequence
  Made in lab - Fc-ILR fusion protein construct
EPKSSDKTHTCPPCPAPEAAGGPSVFLFPPKPKDTLYITREPEVTCVVVDVSHEDPEVKFNWYVDGVEVHNAKTKPREEQYNSTYRVVSVLTVLHQDWLNGKEYKCKVSNKALAAPIEKTISKAKGQPREPQVYTLPPSREEMTKNQVSLTCLVKGFYPSDIAVEWESNGQPENNYKTTPPVLDSDGSFFLYSKLTVDKSRWQQGNVFSCSVMHEALHNHYTQKSLSLSPGKGGSLSGRSANAGGSNWVNVISDLKKIEDLIQSMHIDATLYTESDVHPSCKVTAMKCFLLELQVISLESGDASIHDTVENLIILANNSLSSNGNVTESGCKECEELEEKNIKEFLQSFVHIVQMFINTAGGSGGSGGSGGSGGSITCPPPMSVEHADIWVKSYSLYSRERYICNSGFKRKAGTSSLTECVLNKATNVAHWTTPSLKCIRDPALVHQRPAPPS

SEQ ID NO: 88 - protein, 239 aa, Artificial Sequence
  Made in lab - Fc-ILR fusion protein construct
EPKSSDKTHTCPPCPAPEAAGGPSVFLFPPKPKDTLYITREPEVTCVVVDVSHEDPEVKFNWYVDGVEVHNAKTKPREEQYNSTYRVVSVLTVLHQDWLNGKEYKCKVSNKALAAPIEKTISKAKGQPREPQVYTLPPSREEMTKNQVSLTCLVKGFYPSDIAVEWESNGQPENNYKTTPPVLDSDGSFFLYSKLTVDKSRWQQGNVFSCSVMHEALHNHYTQKSLSLSPGKGGSLSGR

SEQ ID NO: 89 - protein, 214 aa, Artificial Sequence
  Made in lab - ILR fusion protein construct
SANAGGSNWVNVISDLKKIEDLIQSMHIDATLYTESDVHPSCKVTAMKCFLLELQVISLESGDASIHDTVENLIILANNSLSSNGNVTESGCKECEELEEKNIKEFLQSFVHIVQMFINTAGGSGGSGGSGGSGGSITCPPPMSVEHADIWVKSYSLYSRERYICNSGFKRKAGTSSLTECVLNKATNVAHWTTPSLKCIRDPALVHQRPAPPS

SEQ ID NO: 90 - protein, 453 aa, Artificial Sequence; identical to SEQ ID NO: 87
  Made in lab - Fc-ILR fusion protein construct

SEQ ID NO: 91 - protein, 239 aa, Artificial Sequence; identical to SEQ ID NO: 88
  Made in lab - Fc-ILR fusion protein construct

SEQ ID NO: 92 - protein, 214 aa, Artificial Sequence; identical to SEQ ID NO: 89
  Made in lab - ILR fusion protein construct

SEQ ID NO: 93 - protein, 242 aa, Artificial Sequence
  Made in lab - Fc-ILR fusion protein construct
EPKSSDKTHTCPPCPAPEAAGGPSVFLFPPKPKDTLYITREPEVTCVVVDVSHEDPEVKFNWYVDGVEVHNAKTKPREEQYNSTYRVVSVLTVLHQDWLNGKEYKCKVSNKALAAPIEKTISKAKGQPREPQVYTLPPSREEMTKNQVSLTCLVKGFYPSDIAVEWESNGQPENNYKTTPPVLDSDGSFFLYSKLTVDKSRWQQGNVFSCSVMHEALHNHYTQKSLSLSPGKGGSLSGRSAN

SEQ ID NO: 94 - protein, 211 aa, Artificial Sequence
  Made in lab - ILR fusion protein construct
AGGSNWVNVISDLKKIEDLIQSMHIDATLYTESDVHPSCKVTAMKCFLLELQVISLESGDASIHDTVENLIILANNSLSSNGNVTESGCKECEELEEKNIKEFLQSFVHIVQMFINTAGGSGGSGGSGGSGGSITCPPPMSVEHADIWVKSYSLYSRERYICNSGFKRKAGTSSLTECVLNKATNVAHWTTPSLKCIRDPALVHQRPAPPS

SEQ ID NO: 95 - protein, 453 aa, Artificial Sequence; identical to SEQ ID NO: 87
  Made in lab - Fc-ILR fusion protein construct

SEQ ID NO: 96 - protein, 242 aa, Artificial Sequence; identical to SEQ ID NO: 93
  Made in lab - Fc-ILR fusion protein construct

SEQ ID NO: 97 - protein, 211 aa, Artificial Sequence; identical to SEQ ID NO: 94
  Made in lab - ILR fusion protein construct

SEQ ID NO: 98 - protein, 453 aa, Artificial Sequence
  Made in lab - Fc-ILR fusion protein construct
EPKSSDKTHTCPPCPAPEAAGGPSVFLFPPKPKDTLYITREPEVTCVVVDVSHEDPEVKFNWYVDGVEVHNAKTKPREEQYNSTYRVVSVLTVLHQDWLNGKEYKCKVSNKALAAPIEKTISKAKGQPREPQVYTLPPSREEMTKNQVSLTCLVKGFYPSDIAVEWESNGQPENNYKTTPPVLDSDGSFFLYSKLTVDKSRWQQGNVFSCSVMHEALHNHYTQKSLSLSPGKGPLGLAGRSANAGSNWVNVISDLKKIEDLIQSMHIDATLYTESDVHPSCKVTAMKCFLLELQVISLESGDASIHDTVENLIILANNSLSSNGNVTESGCKECEELEEKNIKEFLQSFVHIVQMFINTAGGSGGSGGSGGSGGSITCPPPMSVEHADIWVKSYSLYSRERYICNSGFKRKAGTSSLTECVLNKATNVAHWTTPSLKCIRDPALVHQRPAPPS

SEQ ID NO: 99 - protein, 240 aa, Artificial Sequence
  Made in lab - Fc-ILR fusion protein construct
EPKSSDKTHTCPPCPAPEAAGGPSVFLFPPKPKDTLYITREPEVTCVVVDVSHEDPEVKFNWYVDGVEVHNAKTKPREEQYNSTYRVVSVLTVLHQDWLNGKEYKCKVSNKALAAPIEKTISKAKGQPREPQVYTLPPSREEMTKNQVSLTCLVKGFYPSDIAVEWESNGQPENNYKTTPPVLDSDGSFFLYSKLTVDKSRWQQGNVFSCSVMHEALHNHYTQKSLSLSPGKGPLGLAGR

SEQ ID NO: 100 - protein, 213 aa, Artificial Sequence; identical to SEQ ID NO: 78
  Made in lab - ILR fusion protein construct

SEQ ID NO: 101 - protein, 453 aa, Artificial Sequence; identical to SEQ ID NO: 98
  Made in lab - Fc-ILR fusion protein construct

SEQ ID NO: 102 - protein, 240 aa, Artificial Sequence; identical to SEQ ID NO: 99
  Made in lab - Fc-ILR fusion protein construct

SEQ ID NO: 103 - protein, 213 aa, Artificial Sequence; identical to SEQ ID NO: 78
  Made in lab - ILR fusion protein construct

SEQ ID NO: 104 - protein, 243 aa, Artificial Sequence
  Made in lab - Fc-ILR fusion protein construct
EPKSSDKTHTCPPCPAPEAAGGPSVFLFPPKPKDTLYITREPEVTCVVVDVSHEDPEVKFNWYVDGVEVHNAKTKPREEQYNSTYRVVSVLTVLHQDWLNGKEYKCKVSNKALAAPIEKTISKAKGQPREPQVYTLPPSREEMTKNQVSLTCLVKGFYPSDIAVEWESNGQPENNYKTTPPVLDSDGSFFLYSKLTVDKSRWQQGNVFSCSVMHEALHNHYTQKSLSLSPGKGPLGLAGRSAN

SEQ ID NO: 105 - protein, 210 aa, Artificial Sequence; identical to SEQ ID NO: 83
  Made in lab - ILR fusion protein construct

SEQ ID NO: 106 - protein, 453 aa, Artificial Sequence; identical to SEQ ID NO: 98
  Made in lab - Fc-ILR fusion protein construct

SEQ ID NO: 107 - protein, 243 aa, Artificial Sequence; identical to SEQ ID NO: 104
  Made in lab - Fc-ILR fusion protein construct

SEQ ID NO: 108 - protein, 210 aa, Artificial Sequence; identical to SEQ ID NO: 83
  Made in lab - ILR fusion protein construct

SEQ ID NO: 109 - protein, 236 aa, Artificial Sequence
  Made in lab - Fc-ILR fusion protein construct
EPKSSDKTHTCPPCPAPEAAGGPSVFLFPPKPKDTLYITREPEVTCVVVDVSHEDPEVKFNWYVDGVEVHNAKTKPREEQYNSTYRVVSVLTVLHQDWLNGKEYKCKVSNKALAAPIEKTISKAKGQPREPQVYTLPPSREEMTKNQVSLTCLVKGFYPSDIAVEWESNGQPENNYKTTPPVLDSDGSFFLYSKLTVDKSRWQQGNVFSCSVMHEALHNHYTQKSLSLSPGKGPLG

SEQ ID NO: 110 - protein, 217 aa, Artificial Sequence
  Made in lab - ILR fusion protein construct
LAGRSANAGSNWVNVISDLKKIEDLIQSMHIDATLYTESDVHPSCKVTAMKCFLLELQVISLESGDASIHDTVENLIILANNSLSSNGNVTESGCKECEELEEKNIKEFLQSFVHIVQMFINTAGGSGGSGGSGGSGGSITCPPPMSVEHADIWVKSYSLYSRERYICNSGFKRKAGTSSLTECVLNKATNVAHWTTPSLKCIRDPALVHQRPAPPS

SEQ ID NO: 111 - protein, 453 aa, Artificial Sequence; identical to SEQ ID NO: 98
  Made in lab - Fc-ILR fusion protein construct

SEQ ID NO: 112 - protein, 236 aa, Artificial Sequence; identical to SEQ ID NO: 109
  Made in lab - Fc-ILR fusion protein construct

SEQ ID NO: 113 - protein, 217 aa, Artificial Sequence; identical to SEQ ID NO: 110
  Made in lab - ILR fusion protein construct

SEQ ID NO: 114 - protein, 453 aa, Artificial Sequence
  Made in lab - Fc-ILR fusion protein construct
EPKSSDKTHTCPPCPAPEAAGGPSVFLFPPKPKDTLYITREPEVTCVVVDVSHEDPEVKFNWYVDGVEVHNAKTKPREEQYNSTYRVVSVLTVLHQDWLNGKEYKCKVSNKALAAPIEKTISKAKGQPREPQVYTLPPSREEMTKNQVSLTCLVKGFYPSDIAVEWESNGQPENNYKTTPPVLDSDGSFFLYSKLTVDKSRWQQGNVFSCSVMHEALHNHYTQKSLSLSPGKPLGLSGRSANAGPANWVNVISDLKKIEDLIQSMHIDATLYTESDVHPSCKVTAMKCFLLELQVISLESGDASIHDTVENLIILANNSLSSNGNVTESGCKECEELEEKNIKEFLQSFVHIVQMFINTAGGSGGSGGSGGSGGSITCPPPMSVEHADIWVKSYSLYSRERYICNSGFKRKAGTSSLTECVLNKATNVAHWTTPSLKCIRDPALVHQRPAPPS

SEQ ID NO: 115 - protein, 239 aa, Artificial Sequence
  Made in lab - Fc-ILR fusion protein construct
EPKSSDKTHTCPPCPAPEAAGGPSVFLFPPKPKDTLYITREPEVTCVVVDVSHEDPEVKFNWYVDGVEVHNAKTKPREEQYNSTYRVVSVLTVLHQDWLNGKEYKCKVSNKALAAPIEKTISKAKGQPREPQVYTLPPSREEMTKNQVSLTCLVKGFYPSDIAVEWESNGQPENNYKTTPPVLDSDGSFFLYSKLTVDKSRWQQGNVFSCSVMHEALHNHYTQKSLSLSPGKPLGLSGR

SEQ ID NO: 116 - protein, 214 aa, Artificial Sequence
  Made in lab - ILR fusion protein construct
SANAGPANWVNVISDLKKIEDLIQSMHIDATLYTESDVHPSCKVTAMKCFLLELQVISLESGDASIHDTVENLIILANNSLSSNGNVTESGCKECEELEEKNIKEFLQSFVHIVQMFINTAGGSGGSGGSGGSGGSITCPPPMSVEHADIWVKSYSLYSRERYICNSGFKRKAGTSSLTECVLNKATNVAHWTTPSLKCIRDPALVHQRPAPPS

SEQ ID NO: 117 - protein, 453 aa, Artificial Sequence; identical to SEQ ID NO: 114
  Made in lab - Fc-ILR fusion protein construct

SEQ ID NO: 118 - protein, 239 aa, Artificial Sequence; identical to SEQ ID NO: 115
  Made in lab - Fc-ILR fusion protein construct

SEQ ID NO: 119 - protein, 214 aa, Artificial Sequence; identical to SEQ ID NO: 116
  Made in lab - ILR fusion protein construct

SEQ ID NO: 120 - protein, 242 aa, Artificial Sequence
  Made in lab - Fc-ILR fusion protein construct
EPKSSDKTHTCPPCPAPEAAGGPSVFLFPPKPKDTLYITREPEVTCVVVDVSHEDPEVKFNWYVDGVEVHNAKTKPREEQYNSTYRVVSVLTVLHQDWLNGKEYKCKVSNKALAAPIEKTISKAKGQPREPQVYTLPPSREEMTKNQVSLTCLVKGFYPSDIAVEWESNGQPENNYKTTPPVLDSDGSFFLYSKLTVDKSRWQQGNVFSCSVMHEALHNHYTQKSLSLSPGKPLGLSGRSAN

SEQ ID NO: 121 - protein, 211 aa, Artificial Sequence
  Made in lab - ILR fusion protein construct
AGPANWVNVISDLKKIEDLIQSMHIDATLYTESDVHPSCKVTAMKCFLLELQVISLESGDASIHDTVENLIILANNSLSSNGNVTESGCKECEELEEKNIKEFLQSFVHIVQMFINTAGGSGGSGGSGGSGGSITCPPPMSVEHADIWVKSYSLYSRERYICNSGFKRKAGTSSLTECVLNKATNVAHWTTPSLKCIRDPALVHQRPAPPS

SEQ ID NO: 122 - protein, 453 aa, Artificial Sequence; identical to SEQ ID NO: 114
  Made in lab - Fc-ILR fusion protein construct

SEQ ID NO: 123 - protein, 242 aa, Artificial Sequence; identical to SEQ ID NO: 120
  Made in lab - Fc-ILR fusion protein construct

SEQ ID NO: 124 - protein, 211 aa, Artificial Sequence; identical to SEQ ID NO: 121
  Made in lab - ILR fusion protein construct

SEQ ID NO: 125 - protein, 235 aa, Artificial Sequence
  Made in lab - Fc-ILR fusion protein construct
EPKSSDKTHTCPPCPAPEAAGGPSVFLFPPKPKDTLYITREPEVTCVVVDVSHEDPEVKFNWYVDGVEVHNAKTKPREEQYNSTYRVVSVLTVLHQDWLNGKEYKCKVSNKALAAPIEKTISKAKGQPREPQVYTLPPSREEMTKNQVSLTCLVKGFYPSDIAVEWESNGQPENNYKTTPPVLDSDGSFFLYSKLTVDKSRWQQGNVFSCSVMHEALHNHYTQKSLSLSPGKPLG

SEQ ID NO: 126 - protein, 218 aa, Artificial Sequence
  Made in lab - ILR fusion protein construct
LSGRSANAGPANWVNVISDLKKIEDLIQSMHIDATLYTESDVHPSCKVTAMKCFLLELQVISLESGDASIHDTVENLIILANNSLSSNGNVTESGCKECEELEEKNIKEFLQSFVHIVQMFINTAGGSGGSGGSGGSGGSITCPPPMSVEHADIWVKSYSLYSRERYICNSGFKRKAGTSSLTECVLNKATNVAHWTTPSLKCIRDPALVHQRPAPPS

SEQ ID NO: 127 - protein, 453 aa, Artificial Sequence; identical to SEQ ID NO: 114
  Made in lab - Fc-ILR fusion protein construct

SEQ ID NO: 128 - protein, 235 aa, Artificial Sequence; identical to SEQ ID NO: 125
  Made in lab - Fc-ILR fusion protein construct

SEQ ID NO: 129 - protein, 218 aa, Artificial Sequence; identical to SEQ ID NO: 126
  Made in lab - ILR fusion protein construct

SEQ ID NO: 130 - protein, 453 aa, Artificial Sequence
  Made in lab - Fc-ILR fusion protein construct
EPKSSDKTHTCPPCPAPEAAGGPSVFLFPPKPKDTLYITREPEVTCVVVDVSHEDPEVKFNWYVDGVEVHNAKTKPREEQYNSTYRVVSVLTVLHQDWLNGKEYKCKVSNKALAAPIEKTISKAKGQPREPQVYTLPPSREEMTKNQVSLTCLVKGFYPSDIAVEWESNGQPENNYKTTPPVLDSDGSFFLYSKLTVDKSRWQQGNVFSCSVMHEALHNHYTQKSLSLSPGKPLGLAGRSANAGPANWVNVISDLKKIEDLIQSMHIDATLYTESDVHPSCKVTAMKCFLLELQVISLESGDASIHDTVENLIILANNSLSSNGNVTESGCKECEELEEKNIKEFLQSFVHIVQMFINTAGGSGGSGGSGGSGGSITCPPPMSVEHADIWVKSYSLYSRERYICNSGFKRKAGTSSLTECVLNKATNVAHWTTPSLKCIRDPALVHQRPAPPS

SEQ ID NO: 131 - protein, 239 aa, Artificial Sequence
  Made in lab - Fc-ILR fusion protein construct
EPKSSDKTHTCPPCPAPEAAGGPSVFLFPPKPKDTLYITREPEVTCVVVDVSHEDPEVKFNWYVDGVEVHNAKTKPREEQYNSTYRVVSVLTVLHQDWLNGKEYKCKVSNKALAAPIEKTISKAKGQPREPQVYTLPPSREEMTKNQVSLTCLVKGFYPSDIAVEWESNGQPENNYKTTPPVLDSDGSFFLYSKLTVDKSRWQQGNVFSCSVMHEALHNHYTQKSLSLSPGKPLGLAGR

SEQ ID NO: 132 - protein, 214 aa, Artificial Sequence; identical to SEQ ID NO: 116
  Made in lab - ILR fusion protein construct

SEQ ID NO: 133 - protein, 453 aa, Artificial Sequence; identical to SEQ ID NO: 130
  Made in lab - Fc-ILR fusion protein construct

SEQ ID NO: 134 - protein, 239 aa, Artificial Sequence; identical to SEQ ID NO: 131
  Made in lab - Fc-ILR fusion protein construct

SEQ ID NO: 135 - protein, 214 aa, Artificial Sequence; identical to SEQ ID NO: 116
  Made in lab - ILR fusion protein construct

SEQ ID NO: 136 - protein, 242 aa, Artificial Sequence
  Made in lab - Fc-ILR fusion protein construct
EPKSSDKTHTCPPCPAPEAAGGPSVFLFPPKPKDTLYITREPEVTCVVVDVSHEDPEVKFNWYVDGVEVHNAKTKPREEQYNSTYRVVSVLTVLHQDWLNGKEYKCKVSNKALAAPIEKTISKAKGQPREPQVYTLPPSREEMTKNQVSLTCLVKGFYPSDIAVEWESNGQPENNYKTTPPVLDSDGSFFLYSKLTVDKSRWQQGNVFSCSVMHEALHNHYTQKSLSLSPGKPLGLAGRSAN

SEQ ID NO: 137 - protein, 211 aa, Artificial Sequence; identical to SEQ ID NO: 121
  Made in lab - ILR fusion protein construct

SEQ ID NO: 138 - protein, 453 aa, Artificial Sequence; identical to SEQ ID NO: 130
  Made in lab - Fc-ILR fusion protein construct

SEQ ID NO: 139 - protein, 242 aa, Artificial Sequence; identical to SEQ ID NO: 136
  Made in lab - Fc-ILR fusion protein construct

SEQ ID NO: 140 - protein, 211 aa, Artificial Sequence; identical to SEQ ID NO: 121
  Made in lab - ILR fusion protein construct

SEQ ID NO: 141 - protein, 235 aa, Artificial Sequence; identical to SEQ ID NO: 125
  Made in lab - Fc-ILR fusion protein construct

SEQ ID NO: 142 - protein, 218 aa, Artificial Sequence
  Made in lab - ILR fusion protein construct
LAGRSANAGPANWVNVISDLKKIEDLIQSMHIDATLYTESDVHPSCKVTAMKCFLLELQVISLESGDASIHDTVENLIILANNSLSSNGNVTESGCKECEELEEKNIKEFLQSFVHIVQMFINTAGGSGGSGGSGGSGGSITCPPPMSVEHADIWVKSYSLYSRERYICNSGFKRKAGTSSLTECVLNKATNVAHWTTPSLKCIRDPALVHQRPAPPS

SEQ ID NO: 143 - protein, 453 aa, Artificial Sequence; identical to SEQ ID NO: 130
  Made in lab - Fc-ILR fusion protein construct

SEQ ID NO: 144 - protein, 235 aa, Artificial Sequence; identical to SEQ ID NO: 125
  Made in lab - Fc-ILR fusion protein construct

SEQ ID NO: 145 - protein, 218 aa, Artificial Sequence; identical to SEQ ID NO: 142
  Made in lab - ILR fusion protein construct

SEQ ID NO: 146 - protein, 456 aa, Artificial Sequence
  Made in lab - Fc-ILR fusion protein construct
EPKSSDKTHTCPPCPAPEAAGGPSVFLFPPKPKDTLYITREPEVTCVVVDVSHEDPEVKFNWYVDGVEVHNAKTKPREEQYNSTYRVVSVLTVLHQDWLNGKEYKCKVSNKALAAPIEKTISKAKGQPREPQVYTLPPSREEMTKNQVSLTCLVKGFYPSDIAVEWESNGQPENNYKTTPPVLDSDGSFFLYSKLTVDKSRWQQGNVFSCSVMHEALHNHYTQKSLSLSPGKGPLGLSGRSANAGPASGNWVNVISDLKKIEDLIQSMHIDATLYTESDVHPSCKVTAMKCFLLELQVISLESGDASIHDTVENLIILANNSLSSNGNVTESGCKECEELEEKNIKEFLQSFVHIVQMFINTAGGSGGSGGSGGSGGSITCPPPMSVEHADIWVKSYSLYSRERYICNSGFKRKAGTSSLTECVLNKATNVAHWTTPSLKCIRDPALVHQRPAPPS

SEQ ID NO: 147 - protein, 240 aa, Artificial Sequence
  Made in lab - Fc-ILR fusion protein construct
EPKSSDKTHTCPPCPAPEAAGGPSVFLFPPKPKDTLYITREPEVTCVVVDVSHEDPEVKFNWYVDGVEVHNAKTKPREEQYNSTYRVVSVLTVLHQDWLNGKEYKCKVSNKALAAPIEKTISKAKGQPREPQVYTLPPSREEMTKNQVSLTCLVKGFYPSDIAVEWESNGQPENNYKTTPPVLDSDGSFFLYSKLTVDKSRWQQGNVFSCSVMHEALHNHYTQKSLSLSPGKGPLGLSGR

SEQ ID NO: 148 - protein, 216 aa, Artificial Sequence
  Made in lab - ILR fusion protein construct
SANAGPASGNWVNVISDLKKIEDLIQSMHIDATLYTESDVHPSCKVTAMKCFLLELQVISLESGDASIHDTVENLIILANNSLSSNGNVTESGCKECEELEEKNIKEFLQSFVHIVQMFINTAGGSGGSGGSGGSGGSITCPPPMSVEHADIWVKSYSLYSRERYICNSGFKRKAGTSSLTECVLNKATNVAHWTTPSLKCIRDPALVHQRPAPPS

SEQ ID NO: 149 - protein, 456 aa, Artificial Sequence; identical to SEQ ID NO: 146
  Made in lab - Fc-ILR fusion protein construct

SEQ ID NO: 150 - protein, 240 aa, Artificial Sequence; identical to SEQ ID NO: 147
  Made in lab - Fc-ILR fusion protein construct

SEQ ID NO: 151 - protein, 216 aa, Artificial Sequence; identical to SEQ ID NO: 148
  Made in lab - ILR fusion protein construct

SEQ ID NO: 152 - protein, 243 aa, Artificial Sequence
  Made in lab - Fc-ILR fusion protein construct
EPKSSDKTHTCPPCPAPEAAGGPSVFLFPPKPKDTLYITREPEVTCVVVDVSHEDPEVKFNWYVDGVEVHNAKTKPREEQYNSTYRVVSVLTVLHQDWLNGKEYKCKVSNKALAAPIEKTISKAKGQPREPQVYTLPPSREEMTKNQVSLTCLVKGFYPSDIAVEWESNGQPENNYKTTPPVLDSDGSFFLYSKLTVDKSRWQQGNVFSCSVMHEALHNHYTQKSLSLSPGKGPLGLSGRSAN

SEQ ID NO: 153 - protein, 213 aa, Artificial Sequence
  Made in lab - ILR fusion protein construct
AGPASGNWVNVISDLKKIEDLIQSMHIDATLYTESDVHPSCKVTAMKCFLLELQVISLESGDASIHDTVENLIILANNSLSSNGNVTESGCKECEELEEKNIKEFLQSFVHIVQMFINTAGGSGGSGGSGGSGGSITCPPPMSVEHADIWVKSYSLYSRERYICNSGFKRKAGTSSLTECVLNKATNVAHWTTPSLKCIRDPALVHQRPAPPS

SEQ ID NO: 154 - protein, 456 aa, Artificial Sequence; identical to SEQ ID NO: 146
  Made in lab - Fc-ILR fusion protein construct

SEQ ID NO: 155 - protein, 243 aa, Artificial Sequence; identical to SEQ ID NO: 152
  Made in lab - Fc-ILR fusion protein construct

SEQ ID NO: 156 - protein, 213 aa, Artificial Sequence; identical to SEQ ID NO: 153
  Made in lab - ILR fusion protein construct

SEQ ID NO: 157 - protein, 236 aa, Artificial Sequence; identical to SEQ ID NO: 109
  Made in lab - Fc-ILR fusion protein construct

SEQ ID NO: 158 - protein, 220 aa, Artificial Sequence
  Made in lab - ILR fusion protein construct
LSGRSANAGPASGNWVNVISDLKKIEDLIQSMHIDATLYTESDVHPSCKVTAMKCFLLELQVISLESGDASIHDTVENLIILANNSLSSNGNVTESGCKECEELEEKNIKEFLQSFVHIVQMFINTAGGSGGSGGSGGSGGSITCPPPMSVEHADIWVKSYSLYSRERYICNSGFKRKAGTSSLTECVLNKATNVAHWTTPSLKCIRDPALVHQRPAPPS

SEQ ID NO: 159 - protein, 456 aa, Artificial Sequence; identical to SEQ ID NO: 146
  Made in lab - Fc-ILR fusion protein construct

SEQ ID NO: 160 - protein, 236 aa, Artificial Sequence; identical to SEQ ID NO: 109
  Made in lab - Fc-ILR fusion protein construct

SEQ ID NO: 161 - protein, 220 aa, Artificial Sequence; identical to SEQ ID NO: 158
  Made in lab - ILR fusion protein construct

SEQ ID NO: 162 - protein, 456 aa, Artificial Sequence
  Made in lab - Fc-ILR fusion protein construct
EPKSSDKTHTCPPCPAPEAAGGPSVFLFPPKPKDTLYITREPEVTCVVVDVSHEDPEVKFNWYVDGVEVHNAKTKPREEQYNSTYRVVSVLTVLHQDWLNGKEYKCKVSNKALAAPIEKTISKAKGQPREPQVYTLPPSREEMTKNQVSLTCLVKGFYPSDIAVEWESNGQPENNYKTTPPVLDSDGSFFLYSKLTVDKSRWQQGNVFSCSVMHEALHNHYTQKSLSLSPGKGPLGLAGRSANAGPASGNWVNVISDLKKIEDLIQSMHIDATLYTESDVHPSCKVTAMKCFLLELQVISLESGDASIHDTVENLIILANNSLSSNGNVTESGCKECEELEEKNIKEFLQSFVHIVQMFINTAGGSGGSGGSGGSGGSITCPPPMSVEHADIWVKSYSLYSRERYICNSGFKRKAGTSSLTECVLNKATNVAHWTTPSLKCIRDPALVHQRPAPPS

SEQ ID NO: 163 - protein, 240 aa, Artificial Sequence; identical to SEQ ID NO: 99
  Made in lab - Fc-ILR fusion protein construct

SEQ ID NO: 164 - protein, 216 aa, Artificial Sequence; identical to SEQ ID NO: 148
  Made in lab - ILR fusion protein construct

SEQ ID NO: 165 - protein, 456 aa, Artificial Sequence; identical to SEQ ID NO: 162
  Made in lab - Fc-ILR fusion protein construct

SEQ ID NO: 166 - protein, 240 aa, Artificial Sequence; identical to SEQ ID NO: 99
  Made in lab - Fc-ILR fusion protein construct

SEQ ID NO: 167 - protein, 216 aa, Artificial Sequence; identical to SEQ ID NO: 148
  Made in lab - ILR fusion protein construct

SEQ ID NO: 168 - protein, 243 aa, Artificial Sequence; identical to SEQ ID NO: 104
  Made in lab - Fc-ILR fusion protein construct

SEQ ID NO: 169 - protein, 213 aa, Artificial Sequence; identical to SEQ ID NO: 153
  Made in lab - ILR fusion protein construct

SEQ ID NO: 170 - protein, 456 aa, Artificial Sequence; identical to SEQ ID NO: 162
  Made in lab - Fc-ILR fusion protein construct

SEQ ID NO: 171 - protein, 243 aa, Artificial Sequence; identical to SEQ ID NO: 104
  Made in lab - Fc-ILR fusion protein construct

SEQ ID NO: 172 - protein, 213 aa, Artificial Sequence; identical to SEQ ID NO: 153
  Made in lab - ILR fusion protein construct

SEQ ID NO: 173 - protein, 236 aa, Artificial Sequence; identical to SEQ ID NO: 109
  Made in lab - Fc-ILR fusion protein construct

SEQ ID NO: 174 - protein, 220 aa, Artificial Sequence
  Made in lab - ILR fusion protein construct
LAGRSANAGPASGNWVNVISDLKKIEDLIQSMHIDATLYTESDVHPSCKVTAMKCFLLELQVISLESGDASIHDTVENLIILANNSLSSNGNVTESGCKECEELEEKNIKEFLQSFVHIVQMFINTAGGSGGSGGSGGSGGSITCPPPMSVEHADIWVKSYSLYSRERYICNSGFKRKAGTSSLTECVLNKATNVAHWTTPSLKCIRDPALVHQRPAPPS

SEQ ID NO: 175 - protein, 456 aa, Artificial Sequence; identical to SEQ ID NO: 162
  Made in lab - Fc-ILR fusion protein construct

SEQ ID NO: 176 - protein, 236 aa, Artificial Sequence; identical to SEQ ID NO: 109
  Made in lab - Fc-ILR fusion protein construct

SEQ ID NO: 177 - protein, 220 aa, Artificial Sequence; identical to SEQ ID NO: 174
  Made in lab - ILR fusion protein construct

SEQ ID NO: 178 - protein, 456 aa, Artificial Sequence
  Made in lab - Fc-ILR fusion protein construct
EPKSSDKTHTCPPCPAPEAAGGPSVFLFPPKPKDTLYITREPEVTCVVVDVSHEDPEVKFNWYVDGVEVHNAKTKPREEQYNSTYRVVSVLTVLHQDWLNGKEYKCKVSNKALAAPIEKTISKAKGQPREPQVYTLPPSREEMTKNQVSLTCLVKGFYPSDIAVEWESNGQPENNYKTTPPVLDSDGSFFLYSKLTVDKSRWQQGNVFSCSVMHEALHNHYTQKSLSLSPGKSGPLGLAGRSANAGPASNWVNVISDLKKIEDLIQSMHIDATLYTESDVHPSCKVTAMKCFLLELQVISLESGDASIHDTVENLIILANNSLSSNGNVTESGCKECEELEEKNIKEFLQSFVHIVQMFINTAGGSGGSGGSGGSGGSITCPPPMSVEHADIWVKSYSLYSRERYICNSGFKRKAGTSSLTECVLNKATNVAHWTTPSLKCIRDPALVHQRPAPPS

SEQ ID NO: 179 - protein, 241 aa, Artificial Sequence
  Made in lab - Fc-ILR fusion protein construct
EPKSSDKTHTCPPCPAPEAAGGPSVFLFPPKPKDTLYITREPEVTCVVVDVSHEDPEVKFNWYVDGVEVHNAKTKPREEQYNSTYRVVSVLTVLHQDWLNGKEYKCKVSNKALAAPIEKTISKAKGQPREPQVYTLPPSREEMTKNQVSLTCLVKGFYPSDIAVEWESNGQPENNYKTTPPVLDSDGSFFLYSKLTVDKSRWQQGNVFSCSVMHEALHNHYTQKSLSLSPGKSGPLGLAGR

SEQ ID NO: 180 - protein, 215 aa, Artificial Sequence
  Made in lab - ILR fusion protein construct
SANAGPASNWVNVISDLKKIEDLIQSMHIDATLYTESDVHPSCKVTAMKCFLLELQVISLESGDASIHDTVENLIILANNSLSSNGNVTESGCKECEELEEKNIKEFLQSFVHIVQMFINTAGGSGGSGGSGGSGGSITCPPPMSVEHADIWVKSYSLYSRERYICNSGFKRKAGTSSLTECVLNKATNVAHWTTPSLKCIRDPALVHQRPAPPS

SEQ ID NO: 181 - protein, 456 aa, Artificial Sequence; identical to SEQ ID NO: 178
  Made in lab - Fc-ILR fusion protein construct

SEQ ID NO: 182 - protein, 241 aa, Artificial Sequence; identical to SEQ ID NO: 179
  Made in lab - Fc-ILR fusion protein construct

SEQ ID NO: 183 - protein, 215 aa, Artificial Sequence; identical to SEQ ID NO: 180
  Made in lab - ILR fusion protein construct

SEQ ID NO: 184 - protein, 244 aa, Artificial Sequence
  Made in lab - Fc-ILR fusion protein construct
EPKSSDKTHTCPPCPAPEAAGGPSVFLFPPKPKDTLYITREPEVTCVVVDVSHEDPEVKFNWYVDGVEVHNAKTKPREEQYNSTYRVVSVLTVLHQDWLNGKEYKCKVSNKALAAPIEKTISKAKGQPREPQVYTLPPSREEMTKNQVSLTCLVKGFYPSDIAVEWESNGQPENNYKTTPPVLDSDGSFFLYSKLTVDKSRWQQGNVFSCSVMHEALHNHYTQKSLSLSPGKSGPLGLAGRSAN

SEQ ID NO: 185 - protein, 212 aa, Artificial Sequence
  Made in lab - ILR fusion protein construct
AGPASNWVNVISDLKKIEDLIQSMHIDATLYTESDVHPSCKVTAMKCFLLELQVISLESGDASIHDTVENLIILANNSLSSNGNVTESGCKECEELEEKNIKEFLQSFVHIVQMFINTAGGSGGSGGSGGSGGSITCPPPMSVEHADIWVKSYSLYSRERYICNSGFKRKAGTSSLTECVLNKATNVAHWTTPSLKCIRDPALVHQRPAPPS

SEQ ID NO: 186 - protein, 456 aa, Artificial Sequence; identical to SEQ ID NO: 178
  Made in lab - Fc-ILR fusion protein construct

SEQ ID NO: 187 - protein, 244 aa, Artificial Sequence; identical to SEQ ID NO: 184
  Made in lab - Fc-ILR fusion protein construct

SEQ ID NO: 188 - protein, 212 aa, Artificial Sequence; identical to SEQ ID NO: 185
  Made in lab - ILR fusion protein construct

SEQ ID NO: 189 - protein, 237 aa, Artificial Sequence
  Made in lab - Fc-ILR fusion protein construct
EPKSSDKTHTCPPCPAPEAAGGPSVFLFPPKPKDTLYITREPEVTCVVVDVSHEDPEVKFNWYVDGVEVHNAKTKPREEQYNSTYRVVSVLTVLHQDWLNGKEYKCKVSNKALAAPIEKTISKAKGQPREPQVYTLPPSREEMTKNQVSLTCLVKGFYPSDIAVEWESNGQPENNYKTTPPVLDSDGSFFLYSKLTVDKSRWQQGNVFSCSVMHEALHNHYTQKSLSLSPGKSGPLG

SEQ ID NO: 190 - protein, 219 aa, Artificial Sequence
  Made in lab - ILR fusion protein construct
LAGRSANAGPASNWVNVISDLKKIEDLIQSMHIDATLYTESDVHPSCKVTAMKCFLLELQVISLESGDASIHDTVENLIILANNSLSSNGNVTESGCKECEELEEKNIKEFLQSFVHIVQMFINTAGGSGGSGGSGGSGGSITCPPPMSVEHADIWVKSYSLYSRERYICNSGFKRKAGTSSLTECVLNKATNVAHWTTPSLKCIRDPALVHQRPAPPS

SEQ ID NO: 191 - protein, 456 aa, Artificial Sequence; identical to SEQ ID NO: 178
  Made in lab - Fc-ILR fusion protein construct

SEQ ID NO: 192 - protein, 237 aa, Artificial Sequence; identical to SEQ ID NO: 189
  Made in lab - Fc-ILR fusion protein construct

SEQ ID NO: 193 - protein, 219 aa, Artificial Sequence; identical to SEQ ID NO: 190
  Made in lab - ILR fusion protein construct

SEQ ID NO: 194 - protein, 456 aa, Artificial Sequence
  Made in lab - Fc-ILR fusion protein construct
EPKSSDKTHTCPPCPAPEAAGGPSVFLFPPKPKDTLYITREPEVTCVVVDVSHEDPEVKFNWYVDGVEVHNAKTKPREEQYNSTYRVVSVLTVLHQDWLNGKEYKCKVSNKALAAPIEKTISKAKGQPREPQVYTLPPSREEMTKNQVSLTCLVKGFYPSDIAVEWESNGQPENNYKTTPPVLDSDGSFFLYSKLTVDKSRWQQGNVFSCSVMHEALHNHYTQKSLSLSPGKSGPASGRSANAPLGLAGNWVNVISDLKKIEDLIQSMHIDATLYTESDVHPSCKVTAMKCFLLELQVISLESGDASIHDTVENLIILANNSLSSNGNVTESGCKECEELEEKNIKEFLQSFVHIVQMFINTAGGSGGSGGSGGSGGSITCPPPMSVEHADIWVKSYSLYSRERYICNSGFKRKAGTSSLTECVLNKATNVAHWTTPSLKCIRDPALVHQRPAPPS

SEQ ID NO: 195 - protein, 239 aa, Artificial Sequence
  Made in lab - Fc-ILR fusion protein construct
EPKSSDKTHTCPPCPAPEAAGGPSVFLFPPKPKDTLYITREPEVTCVVVDVSHEDPEVKFNWYVDGVEVHNAKTKPREEQYNSTYRVVSVLTVLHQDWLNGKEYKCKVSNKALAAPIEKTISKAKGQPREPQVYTLPPSREEMTKNQVSLTCLVKGFYPSDIAVEWESNGQPENNYKTTPPVLDSDGSFFLYSKLTVDKSRWQQGNVFSCSVMHEALHNHYTQKSLSLSPGKSGPASGR

SEQ ID NO: 196 - protein, 217 aa, Artificial Sequence
  Made in lab - ILR fusion protein construct
SANAPLGLAGNWVNVISDLKKIEDLIQSMHIDATLYTESDVHPSCKVTAMKCFLLELQVISLESGDASIHDTVENLIILANNSLSSNGNVTESGCKECEELEEKNIKEFLQSFVHIVQMFINTAGGSGGSGGSGGSGGSITCPPPMSVEHADIWVKSYSLYSRERYICNSGFKRKAGTSSLTECVLNKATNVAHWTTPSLKCIRDPALVHQRPAPPS

SEQ ID NO: 197 - protein, 456 aa, Artificial Sequence; identical to SEQ ID NO: 194
  Made in lab - Fc-ILR fusion protein construct

SEQ ID NO: 198 - protein, 239 aa, Artificial Sequence; identical to SEQ ID NO: 195
  Made in lab - Fc-ILR fusion protein construct

SEQ ID NO: 199 - protein, 217 aa, Artificial Sequence; identical to SEQ ID NO: 196
  Made in lab - ILR fusion protein construct

SEQ ID NO: 200 - protein, 242 aa, Artificial Sequence
  Made in lab - Fc-ILR fusion protein construct
EPKSSDKTHTCPPCPAPEAAGGPSVFLFPPKPKDTLYITREPEVTCVVVDVSHEDPEVKFNWYVDGVEVHNAKTKPREEQYNSTYRVVSVLTVLHQDWLNGKEYKCKVSNKALAAPIEKTISKAKGQPREPQVYTLPPSREEMTKNQVSLTCLVKGFYPSDIAVEWESNGQPENNYKTTPPVLDSDGSFFLYSKLTVDKSRWQQGNVFSCSVMHEALHNHYTQKSLSLSPGKSGPASGRSAN

SEQ ID NO: 201 - protein, 214 aa, Artificial Sequence
  Made in lab - ILR fusion protein construct
APLGLAGNWVNVISDLKKIEDLIQSMHIDATLYTESDVHPSCKVTAMKCFLLELQVISLESGDASIHDTVENLIILANNSLSSNGNVTESGCKECEELEEKNIKEFLQSFVHIVQMFINTAGGSGGSGGSGGSGGSITCPPPMSVEHADIWVKSYSLYSRERYICNSGFKRKAGTSSLTECVLNKATNVAHWTTPSLKCIRDPALVHQRPAPPS

SEQ ID NO: 202 - protein, 456 aa, Artificial Sequence; identical to SEQ ID NO: 194
  Made in lab - Fc-ILR fusion protein construct

SEQ ID NO: 203 - protein, 242 aa, Artificial Sequence; identical to SEQ ID NO: 200
  Made in lab - Fc-ILR fusion protein construct

SEQ ID NO: 204 - protein, 214 aa, Artificial Sequence; identical to SEQ ID NO: 201
  Made in lab - ILR fusion protein construct

SEQ ID NO: 205 - protein, 246 aa, Artificial Sequence
  Made in lab - Fc-ILR fusion protein construct
EPKSSDKTHTCPPCPAPEAAGGPSVFLFPPKPKDTLYITREPEVTCVVVDVSHEDPEVKFNWYVDGVEVHNAKTKPREEQYNSTYRVVSVLTVLHQDWLNGKEYKCKVSNKALAAPIEKTISKAKGQPREPQVYTLPPSREEMTKNQVSLTCLVKGFYPSDIAVEWESNGQPENNYKTTPPVLDSDGSFFLYSKLTVDKSRWQQGNVFSCSVMHEALHNHYTQKSLSLSPGKSGPASGRSANAPLG

SEQ ID NO: 206 - protein, 210 aa, Artificial Sequence
  Made in lab - ILR fusion protein construct
LAGNWVNVISDLKKIEDLIQSMHIDATLYTESDVHPSCKVTAMKCFLLELQVISLESGDASIHDTVENLIILANNSLSSNGNVTESGCKECEELEEKNIKEFLQSFVHIVQMFINTAGGSGGSGGSGGSGGSITCPPPMSVEHADIWVKSYSLYSRERYICNSGFKRKAGTSSLTECVLNKATNVAHWTTPSLKCIRDPALVHQRPAPPS

SEQ ID NO: 207 - protein, 456 aa, Artificial Sequence; identical to SEQ ID NO: 194
  Made in lab - Fc-ILR fusion protein construct

SEQ ID NO: 208 - protein, 246 aa, Artificial Sequence; identical to SEQ ID NO: 205
  Made in lab - Fc-ILR fusion protein construct

SEQ ID NO: 209 - protein, 210 aa, Artificial Sequence; identical to SEQ ID NO: 206
  Made in lab - ILR fusion protein construct

SEQ ID NO: 210 - protein, 458 aa, Artificial Sequence
  Made in lab - Fc-ILR fusion protein construct
EPKSSDKTHTCPPCPAPEAAGGPSVFLFPPKPKDTLYITREPEVTCVVVDVSHEDPEVKFNWYVDGVEVHNAKTKPREEQYNSTYRVVSVLTVLHQDWLNGKEYKCKVSNKALAAPIEKTISKAKGQPREPQVYTLPPSREEMTKNQVSLTCLVKGFYPSDIAVEWESNGQPENNYKTTPPVLDSDGSFFLYSKLTVDKSRWQQGNVFSCSVMHEALHNHYTQKSLSLSPGKGSGPASGRSANAPLGLAGSNWVNVISDLKKIEDLIQSMHIDATLYTESDVHPSCKVTAMKCFLLELQVISLESGDASIHDTVENLIILANNSLSSNGNVTESGCKECEELEEKNIKEFLQSFVHIVQMFINTAGGSGGSGGSGGSGGSITCPPPMSVEHADIWVKSYSLYSRERYICNSGFKRKAGTSSLTECVLNKATNVAHWTTPSLKCIRDPALVHQRPAPPS

SEQ ID NO: 211 - protein, 240 aa, Artificial Sequence
  Made in lab - Fc-ILR fusion protein construct
EPKSSDKTHTCPPCPAPEAAGGPSVFLFPPKPKDTLYITREPEVTCVVVDVSHEDPEVKFNWYVDGVEVHNAKTKPREEQYNSTYRVVSVLTVLHQDWLNGKEYKCKVSNKALAAPIEKTISKAKGQPREPQVYTLPPSREEMTKNQVSLTCLVKGFYPSDIAVEWESNGQPENNYKTTPPVLDSDGSFFLYSKLTVDKSRWQQGNVFSCSVMHEALHNHYTQKSLSLSPGKGSGPASGR

SEQ ID NO: 212 - protein, 218 aa, Artificial Sequence
  Made in lab - ILR fusion protein construct
SANAPLGLAGSNWVNVISDLKKIEDLIQSMHIDATLYTESDVHPSCKVTAMKCFLLELQVISLESGDASIHDTVENLIILANNSLSSNGNVTESGCKECEELEEKNIKEFLQSFVHIVQMFINTAGGSGGSGGSGGSGGSITCPPPMSVEHADIWVKSYSLYSRERYICNSGFKRKAGTSSLTECVLNKATNVAHWTTPSLKCIRDPALVHQRPAPPS

SEQ ID NO: 213 - protein, 458 aa, Artificial Sequence; identical to SEQ ID NO: 210
  Made in lab - Fc-ILR fusion protein construct

SEQ ID NO: 214 - protein, 240 aa, Artificial Sequence; identical to SEQ ID NO: 211
  Made in lab - Fc-ILR fusion protein construct

SEQ ID NO: 215 - protein, 218 aa, Artificial Sequence; identical to SEQ ID NO: 212
  Made in lab - ILR fusion protein construct

SEQ ID NO: 216 - protein, 243 aa, Artificial Sequence
  Made in lab - Fc-ILR fusion protein construct
EPKSSDKTHTCPPCPAPEAAGGPSVFLFPPKPKDTLYITREPEVTCVVVDVSHEDPEVKFNWYVDGVEVHNAKTKPREEQYNSTYRVVSVLTVLHQDWLNGKEYKCKVSNKALAAPIEKTISKAKGQPREPQVYTLPPSREEMTKNQVSLTCLVKGFYPSDIAVEWESNGQPENNYKTTPPVLDSDGSFFLYSKLTVDKSRWQQGNVFSCSVMHEALHNHYTQKSLSLSPGKGSGPASGRSAN

SEQ ID NO: 217 - protein, 215 aa, Artificial Sequence
  Made in lab - ILR fusion protein construct
APLGLAGSNWVNVISDLKKIEDLIQSMHIDATLYTESDVHPSCKVTAMKCFLLELQVISLESGDASIHDTVENLIILANNSLSSNGNVTESGCKECEELEEKNIKEFLQSFVHIVQMFINTAGGSGGSGGSGGSGGSITCPPPMSVEHADIWVKSYSLYSRERYICNSGFKRKAGTSSLTECVLNKATNVAHWTTPSLKCIRDPALVHQRPAPPS

SEQ ID NO: 218 - protein, 458 aa, Artificial Sequence; identical to SEQ ID NO: 210
  Made in lab - Fc-ILR fusion protein construct

SEQ ID NO: 219 - protein, 243 aa, Artificial Sequence; identical to SEQ ID NO: 216
  Made in lab - Fc-ILR fusion protein construct

SEQ ID NO: 220 - protein, 215 aa, Artificial Sequence; identical to SEQ ID NO: 217
  Made in lab - ILR fusion protein construct

SEQ ID NO: 221 - protein, 247 aa, Artificial Sequence
  Made in lab - Fc-ILR fusion protein construct
EPKSSDKTHTCPPCPAPEAAGGPSVFLFPPKPKDTLYITREPEVTCVVVDVSHEDPEVKFNWYVDGVEVHNAKTKPREEQYNSTYRVVSVLTVLHQDWLNGKEYKCKVSNKALAAPIEKTISKAKGQPREPQVYTLPPSREEMTKNQVSLTCLVKGFYPSDIAVEWESNGQPENNYKTTPPVLDSDGSFFLYSKLTVDKSRWQQGNVFSCSVMHEALHNHYTQKSLSLSPGKGSGPASGRSANAPLG

SEQ ID NO: 222 - protein, 211 aa, Artificial Sequence
  Made in lab - ILR fusion protein construct
LAGSNWVNVISDLKKIEDLIQSMHIDATLYTESDVHPSCKVTAMKCFLLELQVISLESGDASIHDTVENLIILANNSLSSNGNVTESGCKECEELEEKNIKEFLQSFVHIVQMFINTAGGSGGSGGSGGSGGSITCPPPMSVEHADIWVKSYSLYSRERYICNSGFKRKAGTSSLTECVLNKATNVAHWTTPSLKCIRDPALVHQRPAPPS

SEQ ID NO: 223 - protein, 458 aa, Artificial Sequence; identical to SEQ ID NO: 210
  Made in lab - Fc-ILR fusion protein construct

SEQ ID NO: 224 - protein, 247 aa, Artificial Sequence; identical to SEQ ID NO: 221
  Made in lab - Fc-ILR fusion protein construct

SEQ ID NO: 225 - protein, 211 aa, Artificial Sequence; identical to SEQ ID NO: 222
  Made in lab - ILR fusion protein construct

SEQ ID NO: 226 - protein, 450 aa, Artificial Sequence
  Made in lab - Fc-ILR fusion protein construct
EPKSSDKTHTCPPCPAPELLGGPSVFLFPPKPKDTLMISRTPEVTCVVVDVSHEDPEVKFNWYVDGVEVHNAKTKPREEQYNSTYRVVSVLTVLHQDWLNGKEYKCKVSNKALPAPIEKTISKAKGQPREPQVYTLPPSREEMTKNQVSLTCLVKGFYPSDIAVEWESNGQPENNYKTTPPVLDSDGSFFLYSKLTVDKSRWQQGNVFSCSVMHEALHNHYTQKSLSLSPGKGSENLYFQGGSNWVNVISDLKKIEDLIQSMHIDATLYTESDVHPSCKVTAMKCFLLELQVISCESGDASIHDTVENLIILANNSLSSNGNVTESGCKECEELEEKNIKEFLQSFVHIVQMFINTSGGSGGSGGSGGSGGSITCPPPMSVEHADIWVKSYSLYSRERYICNSGFKRKAGTCSLTECVLNKATNVAHWTTPSLKCIRDPALVHQRPAPPS

SEQ ID NO: 227 - protein, 240 aa, Artificial Sequence; identical to SEQ ID NO: 27
  Made in lab - Fc-ILR fusion protein construct

SEQ ID NO: 228 - protein, 210 aa, Artificial Sequence
  Made in lab - ILR fusion protein construct
GGSNWVNVISDLKKIEDLIQSMHIDATLYTESDVHPSCKVTAMKCFLLELQVISCESGDASIHDTVENLIILANNSLSSNGNVTESGCKECEELEEKNIKEFLQSFVHIVQMFINTSGGSGGSGGSGGSGGSITCPPPMSVEHADIWVKSYSLYSRERYICNSGFKRKAGTCSLTECVLNKATNVAHWTTPSLKCIRDPALVHQRPAPPS

SEQ ID NO: 229 - protein, 450 aa, Artificial Sequence; identical to SEQ ID NO: 226
  Made in lab - Fc-ILR fusion protein construct

SEQ ID NO: 230 - protein, 240 aa, Artificial Sequence; identical to SEQ ID NO: 27
  Made in lab - Fc-ILR fusion protein construct

SEQ ID NO: 231 - protein, 210 aa, Artificial Sequence; identical to SEQ ID NO: 228
  Made in lab - ILR fusion protein construct

SEQ ID NO: 232 - protein, 450 aa, Artificial Sequence
  Made in lab - Fc-ILR fusion protein construct
EPKSSDKTHTSPPSPAPELLGGPSVFLFPPKPKDTLMISRTPEVTCVVVDVSHEDPEVKFNWYVDGVEVHNAKTKPREEQYNSTYRVVSVLTVLHQDWLNGKEYKCKVSNKALPAPIEKTISKAKGQPREPQVYTLPPSREEMTKNQVSLTCLVKGFYPSDIAVEWESNGQPENNYKTTPPVLDSDGSFFLYSKLTVDKSRWQQGNVFSCSVMHEALHNHYTQKSLSLSPGKGSENLYFQGGSNWVNVISDLKKIEDLIQSMHIDATLYTESDVHPSCKVTAMKCFLLELQVISCESGDASIHDTVENLIILANNSLSSNGNVTESGCKECEELEEKNIKEFLQSFVHIVQMFINTSGGSGGSGGSGGSGGSITCPPPMSVEHADIWVKSYSLYSRERYICNSGFKRKAGTCSLTECVLNKATNVAHWTTPSLKCIRDPALVHQRPAPPS

SEQ ID NO: 233 - protein, 240 aa, Artificial Sequence
  Made in lab - Fc-ILR fusion protein construct
EPKSSDKTHTSPPSPAPELLGGPSVFLFPPKPKDTLMISRTPEVTCVVVDVSHEDPEVKFNWYVDGVEVHNAKTKPREEQYNSTYRVVSVLTVLHQDWLNGKEYKCKVSNKALPAPIEKTISKAKGQPREPQVYTLPPSREEMTKNQVSLTCLVKGFYPSDIAVEWESNGQPENNYKTTPPVLDSDGSFFLYSKLTVDKSRWQQGNVFSCSVMHEALHNHYTQKSLSLSPGKGSENLYFQ

SEQ ID NO: 234 - protein, 210 aa, Artificial Sequence; identical to SEQ ID NO: 228
  Made in lab - ILR fusion protein construct

SEQ ID NO: 235 - protein, 450 aa, Artificial Sequence; identical to SEQ ID NO: 232
  Made in lab - Fc-ILR fusion protein construct

SEQ ID NO: 236 - protein, 240 aa, Artificial Sequence; identical to SEQ ID NO: 233
  Made in lab - Fc-ILR fusion protein construct

SEQ ID NO: 237 - protein, 210 aa, Artificial Sequence; identical to SEQ ID NO: 228
  Made in lab - ILR fusion protein construct

SEQ ID NO: 238 - protein, 453 aa, Artificial Sequence
  Made in lab - Fc-ILR fusion protein construct
EPKSSDKTHTCPPCPAPEAAGGPSVFLFPPKPKDTLYITREPEVTCVVVDVSHEDPEVKFNWYVDGVEVHNAKTKPREEQYNSTYRVVSVLTVLHQDWLNGKEYKCKVSNKALAAPIEKTISKAKGQPREPQVYTLPPSREEMTKNQVSLTCLVKGFYPSDIAVEWESNGQPENNYKTTPPVLDSDGSFFLYSKLTVDKSRWQQGNVFSCSVMHEALHNHYTQKSLSLSPGKPLGLSGRSANAGPANWVNVISDLKKIEDLIQSMHIDATLYTESDVHPSCKVTAMKCFLLELQVISCESGDASIHDTVENLIILANNSLSSNGNVTESGCKECEELEEKNIKEFLQSFVHIVQMFINTAGGSGGSGGSGGSGGSITCPPPMSVEHADIWVKSYSLYSRERYICNSGFKRKAGTCSLTECVLNKATNVAHWTTPSLKCIRDPALVHQRPAPPS

SEQ ID NO: 239 - protein, 239 aa, Artificial Sequence; identical to SEQ ID NO: 115
  Made in lab - Fc-ILR fusion protein construct

SEQ ID NO: 240 - protein, 214 aa, Artificial Sequence
  Made in lab - ILR fusion protein construct
SANAGPANWVNVISDLKKIEDLIQSMHIDATLYTESDVHPSCKVTAMKCFLLELQVISCESGDASIHDTVENLIILANNSLSSNGNVTESGCKECEELEEKNIKEFLQSFVHIVQMFINTAGGSGGSGGSGGSGGSITCPPPMSVEHADIWVKSYSLYSRERYICNSGFKRKAGTCSLTECVLNKATNVAHWTTPSLKCIRDPALVHQRPAPPS

SEQ ID NO: 241 - protein, 453 aa, Artificial Sequence; identical to SEQ ID NO: 238
  Made in lab - Fc-ILR fusion protein construct

SEQ ID NO: 242 - protein, 239 aa, Artificial Sequence; identical to SEQ ID NO: 115
  Made in lab - Fc-ILR fusion protein construct

SEQ ID NO: 243 - protein, 214 aa, Artificial Sequence; identical to SEQ ID NO: 240
  Made in lab - ILR fusion protein construct

SEQ ID NO: 244 - protein, 242 aa, Artificial Sequence; identical to SEQ ID NO: 120
  Made in lab - Fc-ILR fusion protein construct

SEQ ID NO: 245 - protein, 211 aa, Artificial Sequence
  Made in lab - ILR fusion protein construct
AGPANWVNVISDLKKIEDLIQSMHIDATLYTESDVHPSCKVTAMKCFLLELQVISCESGDASIHDTVENLIILANNSLSSNGNVTESGCKECEELEEKNIKEFLQSFVHIVQMFINTAGGSGGSGGSGGSGGSITCPPPMSVEHADIWVKSYSLYSRERYICNSGFKRKAGTCSLTECVLNKATNVAHWTTPSLKCIRDPALVHQRPAPPS

SEQ ID NO: 246 - protein, 453 aa, Artificial Sequence; identical to SEQ ID NO: 238
  Made in lab - Fc-ILR fusion protein construct

SEQ ID NO: 247 - protein, 242 aa, Artificial Sequence; identical to SEQ ID NO: 120
  Made in lab - Fc-ILR fusion protein construct

SEQ ID NO: 248 - protein, 211 aa, Artificial Sequence; identical to SEQ ID NO: 245
  Made in lab - ILR fusion protein construct

SEQ ID NO: 249 - protein, 235 aa, Artificial Sequence; identical to SEQ ID NO: 125
  Made in lab - Fc-ILR fusion protein construct

SEQ ID NO: 250 - protein, 218 aa, Artificial Sequence
  Made in lab - ILR fusion protein construct
LSGRSANAGPANWVNVISDLKKIEDLIQSMHIDATLYTESDVHPSCKVTAMKCFLLELQVISCESGDASIHDTVENLIILANNSLSSNGNVTESGCKECEELEEKNIKEFLQSFVHIVQMFINTAGGSGGSGGSGGSGGSITCPPPMSVEHADIWVKSYSLYSRERYICNSGFKRKAGTCSLTECVLNKATNVAHWTTPSLKCIRDPALVHQRPAPPS

SEQ ID NO: 251 - protein, 453 aa, Artificial Sequence; identical to SEQ ID NO: 238
  Made in lab - Fc-ILR fusion protein construct

SEQ ID NO: 252 - protein, 235 aa, Artificial Sequence; identical to SEQ ID NO: 125
  Made in lab - Fc-ILR fusion protein construct

SEQ ID NO: 253 - protein, 218 aa, Artificial Sequence; identical to SEQ ID NO: 250
  Made in lab - ILR fusion protein construct

SEQ ID NO: 254 - protein, 453 aa, Artificial Sequence
  Made in lab - Fc-ILR fusion protein construct
EPKSSDKTHTSPPSPAPEAAGGPSVFLFPPKPKDTLYITREPEVTCVVVDVSHEDPEVKFNWYVDGVEVHNAKTKPREEQYNSTYRVVSVLTVLHQDWLNGKEYKCKVSNKALAAPIEKTISKAKGQPREPQVYTLPPSREEMTKNQVSLTCLVKGFYPSDIAVEWESNGQPENNYKTTPPVLDSDGSFFLYSKLTVDKSRWQQGNVFSCSVMHEALHNHYTQKSLSLSPGKPLGLSGRSANAGPANWVNVISDLKKIEDLIQSMHIDATLYTESDVHPSCKVTAMKCFLLELQVISCESGDASIHDTVENLIILANNSLSSNGNVTESGCKECEELEEKNIKEFLQSFVHIVQMFINTAGGSGGSGGSGGSGGSITCPPPMSVEHADIWVKSYSLYSRERYICNSGFKRKAGTCSLTECVLNKATNVAHWTTPSLKCIRDPALVHQRPAPPS

SEQ ID NO: 255 - protein, 239 aa, Artificial Sequence
  Made in lab - Fc-ILR fusion protein construct
EPKSSDKTHTSPPSPAPEAAGGPSVFLFPPKPKDTLYITREPEVTCVVVDVSHEDPEVKFNWYVDGVEVHNAKTKPREEQYNSTYRVVSVLTVLHQDWLNGKEYKCKVSNKALAAPIEKTISKAKGQPREPQVYTLPPSREEMTKNQVSLTCLVKGFYPSDIAVEWESNGQPENNYKTTPPVLDSDGSFFLYSKLTVDKSRWQQGNVFSCSVMHEALHNHYTQKSLSLSPGKPLGLSGR

SEQ ID NO: 256 - protein, 214 aa, Artificial Sequence; identical to SEQ ID NO: 240
  Made in lab - ILR fusion protein construct

SEQ ID NO: 257 - protein, 453 aa, Artificial Sequence; identical to SEQ ID NO: 254
  Made in lab - Fc-ILR fusion protein construct

SEQ ID NO: 258 - protein, 239 aa, Artificial Sequence; identical to SEQ ID NO: 255
  Made in lab - Fc-ILR fusion protein construct

SEQ ID NO: 259 - protein, 214 aa, Artificial Sequence; identical to SEQ ID NO: 240
  Made in lab - ILR fusion protein construct

SEQ ID NO: 260 - protein, 242 aa, Artificial Sequence
  Made in lab - Fc-ILR fusion protein construct
EPKSSDKTHTSPPSPAPEAAGGPSVFLFPPKPKDTLYITREPEVTCVVVDVSHEDPEVKFNWYVDGVEVHNAKTKPREEQYNSTYRVVSVLTVLHQDWLNGKEYKCKVSNKALAAPIEKTISKAKGQPREPQVYTLPPSREEMTKNQVSLTCLVKGFYPSDIAVEWESNGQPENNYKTTPPVLDSDGSFFLYSKLTVDKSRWQQGNVFSCSVMHEALHNHYTQKSLSLSPGKPLGLSGRSAN

SEQ ID NO: 261 - protein, 211 aa, Artificial Sequence; identical to SEQ ID NO: 245
  Made in lab - ILR fusion protein construct

SEQ ID NO: 262 - protein, 453 aa, Artificial Sequence; identical to SEQ ID NO: 254
  Made in lab - Fc-ILR fusion protein construct

SEQ ID NO: 263 - protein, 242 aa, Artificial Sequence; identical to SEQ ID NO: 260
  Made in lab - Fc-ILR fusion protein construct

SEQ ID NO: 264 - protein, 211 aa, Artificial Sequence; identical to SEQ ID NO: 245
  Made in lab - ILR fusion protein construct

SEQ ID NO: 265 - protein, 235 aa, Artificial Sequence
  Made in lab - Fc-ILR fusion protein construct
EPKSSDKTHTSPPSPAPEAAGGPSVFLFPPKPKDTLYITREPEVTCVVVDVSHEDPEVKFNWYVDGVEVHNAKTKPREEQYNSTYRVVSVLTVLHQDWLNGKEYKCKVSNKALAAPIEKTISKAKGQPREPQVYTLPPSREEMTKNQVSLTCLVKGFYPSDIAVEWESNGQPENNYKTTPPVLDSDGSFFLYSKLTVDKSRWQQGNVFSCSVMHEALHNHYTQKSLSLSPGKPLG

SEQ ID NO: 266 - protein, 218 aa, Artificial Sequence; identical to SEQ ID NO: 250
  Made in lab - ILR fusion protein construct

SEQ ID NO: 267 - protein, 453 aa, Artificial Sequence; identical to SEQ ID NO: 254
  Made in lab - Fc-ILR fusion protein construct

SEQ ID NO: 268 - protein, 235 aa, Artificial Sequence; identical to SEQ ID NO: 265
  Made in lab - Fc-ILR fusion protein construct

SEQ ID NO: 269 - protein, 218 aa, Artificial Sequence; identical to SEQ ID NO: 250
  Made in lab - ILR fusion protein construct

SEQ ID NO: 270 - protein, 451 aa, Artificial Sequence
  Made in lab - Fc-ILR fusion protein construct
EPKSSDKTHTCPPCPAPEAAGGPSVFLFPPKPKDTLYITREPEVTCVVVDVSHEDPEVKFNWYVDGVEVHNAKTKPREEQYNSTYRVVSVLTVLHQDWLNGKEYKCKVSNKALAAPIEKTISKAKGQPREPQVYTLPPSREEMTKNQVSLTCLVKGFYPSDIAVEWESNGQPENNYKTTPPVLDSDGSFFLYSKLTVDKSRWQQGNVFSCSVMHEALHNHYTQKSLSLSPGKPLGLSGRSANAGNWVNVISDLKKIEDLIQSMHIDATLYTESDVHPSCKVTAMKCFLLELQVISCESGDASIHDTVENLIILANNSLSSNGNVTESGCKECEELEEKNIKEFLQSFVHIVQMFINTAGGSGGSGGSGGSGGSITCPPPMSVEHADIWVKSYSLYSRERYICNSGFKRKAGTCSLTECVLNKATNVAHWTTPSLKCIRDPALVHQRPAPPS

SEQ ID NO: 271 - protein, 239 aa, Artificial Sequence; identical to SEQ ID NO: 115
  Made in lab - Fc-ILR fusion protein construct

SEQ ID NO: 272 - protein, 212 aa, Artificial Sequence
  Made in lab - ILR fusion protein construct
SANAGNWVNVISDLKKIEDLIQSMHIDATLYTESDVHPSCKVTAMKCFLLELQVISCESGDASIHDTVENLIILANNSLSSNGNVTESGCKECEELEEKNIKEFLQSFVHIVQMFINTAGGSGGSGGSGGSGGSITCPPPMSVEHADIWVKSYSLYSRERYICNSGFKRKAGTCSLTECVLNKATNVAHWTTPSLKCIRDPALVHQRPAPPS

SEQ ID NO: 273 - protein, 451 aa, Artificial Sequence; identical to SEQ ID NO: 270
  Made in lab - Fc-ILR fusion protein construct

SEQ ID NO: 274 - protein, 239 aa, Artificial Sequence; identical to SEQ ID NO: 115
  Made in lab - Fc-ILR fusion protein construct

SEQ ID NO: 275 - protein, 212 aa, Artificial Sequence; identical to SEQ ID NO: 272
  Made in lab - ILR fusion protein construct

SEQ ID NO: 276 - protein, 242 aa, Artificial Sequence; identical to SEQ ID NO: 120
  Made in lab - Fc-ILR fusion protein construct

SEQ ID NO: 277 - protein, 209 aa, Artificial Sequence
  Made in lab - ILR fusion protein construct
AGNWVNVISDLKKIEDLIQSMHIDATLYTESDVHPSCKVTAMKCFLLELQVISCESGDASIHDTVENLIILANNSLSSNGNVTESGCKECEELEEKNIKEFLQSFVHIVQMFINTAGGSGGSGGSGGSGGSITCPPPMSVEHADIWVKSYSLYSRERYICNSGFKRKAGTCSLTECVLNKATNVAHWTTPSLKCIRDPALVHQRPAPPS

SEQ ID NO: 278 - protein, 451 aa, Artificial Sequence; identical to SEQ ID NO: 270
  Made in lab - Fc-ILR fusion protein construct

SEQ ID NO: 279 - protein, 242 aa, Artificial Sequence; identical to SEQ ID NO: 120
  Made in lab - Fc-ILR fusion protein construct

SEQ ID NO: 280 - protein, 209 aa, Artificial Sequence; identical to SEQ ID NO: 277
  Made in lab - ILR fusion protein construct

SEQ ID NO: 281 - protein, 235 aa, Artificial Sequence; identical to SEQ ID NO: 125
  Made in lab - Fc-ILR fusion protein construct

SEQ ID NO: 282 - protein, 216 aa, Artificial Sequence
  Made in lab - ILR fusion protein construct
LSGRSANAGNWVNVISDLKKIEDLIQSMHIDATLYTESDVHPSCKVTAMKCFLLELQVISCESGDASIHDTVENLIILANNSLSSNGNVTESGCKECEELEEKNIKEFLQSFVHIVQMFINTAGGSGGSGGSGGSGGSITCPPPMSVEHADIWVKSYSLYSRERYICNSGFKRKAGTCSLTECVLNKATNVAHWTTPSLKCIRDPALVHQRPAPPS

SEQ ID NO: 283 - protein, 451 aa, Artificial Sequence; identical to SEQ ID NO: 270
  Made in lab - Fc-ILR fusion protein construct

SEQ ID NO: 284 - protein, 235 aa, Artificial Sequence; identical to SEQ ID NO: 125
  Made in lab - Fc-ILR fusion protein construct

SEQ ID NO: 285 - protein, 216 aa, Artificial Sequence; identical to SEQ ID NO: 282
  Made in lab - ILR fusion protein construct

SEQ ID NO: 286 - protein, 450 aa, Artificial Sequence
  Made in lab - Fc-ILR fusion protein construct
EPKSSDKTHTCPPCPAPEAAGGPSVFLFPPKPKDTLYITREPEVTCVVVDVSHEDPEVKFNWYVDGVEVHNAKTKPREEQYNSTYRVVSVLTVLHQDWLNGKEYKCKVSNKALAAPIEKTISKAKGQPREPQVYTLPPSREEMTKNQVSLTCLVKGFYPSDIAVEWESNGQPENNYKTTPPVLDSDGSFFLYSKLTVDKSRWQQGNVFSCSVMHEALHNHYTQKSLSLSPGKPLGLSGRSANANWVNVISDLKKIEDLIQSMHIDATLYTESDVHPSCKVTAMKCFLLELQVISCESGDASIHDTVENLIILANNSLSSNGNVTESGCKECEELEEKNIKEFLQSFVHIVQMFINTAGGSGGSGGSGGSGGSITCPPPMSVEHADIWVKSYSLYSRERYICNSGFKRKAGTCSLTECVLNKATNVAHWTTPSLKCIRDPALVHQRPAPPS

SEQ ID NO: 287 - protein, 239 aa, Artificial Sequence; identical to SEQ ID NO: 115
  Made in lab - Fc-ILR fusion protein construct

SEQ ID NO: 288 - protein, 211 aa, Artificial Sequence
  Made in lab - ILR fusion protein construct
SANANWVNVISDLKKIEDLIQSMHIDATLYTESDVHPSCKVTAMKCFLLELQVISCESGDASIHDTVENLIILANNSLSSNGNVTESGCKECEELEEKNIKEFLQSFVHIVQMFINTAGGSGGSGGSGGSGGSITCPPPMSVEHADIWVKSYSLYSRERYICNSGFKRKAGTCSLTECVLNKATNVAHWTTPSLKCIRDPALVHQRPAPPS

SEQ ID NO: 289 - protein, 450 aa, Artificial Sequence; identical to SEQ ID NO: 286
  Made in lab - Fc-ILR fusion protein construct

SEQ ID NO: 290 - protein, 239 aa, Artificial Sequence; identical to SEQ ID NO: 115
  Made in lab - Fc-ILR fusion protein construct

SEQ ID NO: 291 - protein, 211 aa, Artificial Sequence; identical to SEQ ID NO: 288
  Made in lab - ILR fusion protein construct

SEQ ID NO: 292 - protein, 242 aa, Artificial Sequence; identical to SEQ ID NO: 120
  Made in lab - Fc-ILR fusion protein construct

SEQ ID NO: 293 - protein, 208 aa, Artificial Sequence
  Made in lab - ILR fusion protein construct
ANWVNVISDLKKIEDLIQSMHIDATLYTESDVHPSCKVTAMKCFLLELQVISCESGDASIHDTVENLIILANNSLSSNGNVTESGCKECEELEEKNIKEFLQSFVHIVQMFINTAGGSGGSGGSGGSGGSITCPPPMSVEHADIWVKSYSLYSRERYICNSGFKRKAGTCSLTECVLNKATNVAHWTTPSLKCIRDPALVHQRPAPPS

SEQ ID NO: 294 - protein, 450 aa, Artificial Sequence; identical to SEQ ID NO: 286
  Made in lab - Fc-ILR fusion protein construct

SEQ ID NO: 295 - protein, 242 aa, Artificial Sequence; identical to SEQ ID NO: 120
  Made in lab - Fc-ILR fusion protein construct

SEQ ID NO: 296 - protein, 208 aa, Artificial Sequence; identical to SEQ ID NO: 293
  Made in lab - ILR fusion protein construct

SEQ ID NO: 297 - protein, 235 aa, Artificial Sequence; identical to SEQ ID NO: 125
  Made in lab - Fc-ILR fusion protein construct

SEQ ID NO: 298 - protein, 215 aa, Artificial Sequence
  Made in lab - ILR fusion protein construct
LSGRSANANWVNVISDLKKIEDLIQSMHIDATLYTESDVHPSCKVTAMKCFLLELQVISCESGDASIHDTVENLIILANNSLSSNGNVTESGCKECEELEEKNIKEFLQSFVHIVQMFINTAGGSGGSGGSGGSGGSITCPPPMSVEHADIWVKSYSLYSRERYICNSGFKRKAGTCSLTECVLNKATNVAHWTTPSLKCIRDPALVHQRPAPPS

SEQ ID NO: 299 - protein, 450 aa, Artificial Sequence; identical to SEQ ID NO: 286
  Made in lab - Fc-ILR fusion protein construct

SEQ ID NO: 300 - protein, 235 aa, Artificial Sequence; identical to SEQ ID NO: 125
  Made in lab - Fc-ILR fusion protein construct

SEQ ID NO: 301 - protein, 215 aa, Artificial Sequence; identical to SEQ ID NO: 298
  Made in lab - ILR fusion protein construct

SEQ ID NO: 302 - protein, 451 aa, Artificial Sequence
  Made in lab - Fc-ILR fusion protein construct
EPKSSDKTHTCPPCPAPELLGGPSVFLFPPKPKDTLMISRTPEVTCVVVDVSHEDPEVKFNWYVDGVEVHNAKTKPREEQYNSTYRVVSVLTVLHQDWLNGKEYKCKVSNKALPAPIEKTISKAKGQPREPQVYTLPPSREEMTKNQVSLTCLVKGFYPSDIAVEWESNGQPENNYKTTPPVLDSDGSFFLYSKLTVDKSRWQQGNVFSCSVMHEALHNHYTQKSLSLSPGKGNWVNVISDLKKIEDLIQSMHIDATLYTESDVHPSCKVTAMKCFLLELQVISLESGDASIHDTVENLIILANNSLSSNGNVTESGCKECEELEEKNIKEFLQSFVHIVQMFINTAGGSGGSEPKENLYFQGGGSGGSGGGSITCPPPMSVEHADIWVKSYSLYSRERYICNSGFKRKAGTSSLTECVLNKATNVAHWTTPSLKCIRDPALVHQRPAPPS

SEQ ID NO: 303 - protein, 362 aa, Artificial Sequence
  Made in lab - Fc-ILR fusion protein construct
EPKSSDKTHTCPPCPAPELLGGPSVFLFPPKPKDTLMISRTPEVTCVVVDVSHEDPEVKFNWYVDGVEVHNAKTKPREEQYNSTYRVVSVLTVLHQDWLNGKEYKCKVSNKALPAPIEKTISKAKGQPREPQVYTLPPSREEMTKNQVSLTCLVKGFYPSDIAVEWESNGQPENNYKTTPPVLDSDGSFFLYSKLTVDKSRWQQGNVFSCSVMHEALHNHYTQKSLSLSPGKGNWVNVISDLKKIEDLIQSMHIDATLYTESDVHPSCKVTAMKCFLLELQVISLESGDASIHDTVENLIILANNSLSSNGNVTESGCKECEELEEKNIKEFLQSFVHIVQMFINTAGGSGGSEPKENLYFQ

SEQ ID NO: 304 - protein, 89 aa, Artificial Sequence
  Made in lab - ILR fusion protein construct
GGGSGGSGGGSITCPPPMSVEHADIWVKSYSLYSRERYICNSGFKRKAGTSSLTECVLNKATNVAHWTTPSLKCIRDPALVHQRPAPPS

SEQ ID NO: 305 - protein, 451 aa, Artificial Sequence; identical to SEQ ID NO: 302
  Made in lab - Fc-ILR fusion protein construct

SEQ ID NO: 306 - protein, 362 aa, Artificial Sequence; identical to SEQ ID NO: 303
  Made in lab - Fc-ILR fusion protein construct

SEQ ID NO: 307 - protein, 89 aa, Artificial Sequence; identical to SEQ ID NO: 304
  Made in lab - ILR fusion protein construct

SEQ ID NO: 308 - protein, 456 aa, Artificial Sequence
  Made in lab - Fc-ILR fusion protein construct
EPKSSDKTHTCPPCPAPELLGGPSVFLFPPKPKDTLMISRTPEVTCVVVDVSHEDPEVKFNWYVDGVEVHNAKTKPREEQYNSTYRVVSVLTVLHQDWLNGKEYKCKVSNKALPAPIEKTISKAKGQPREPQVYTLPPSREEMTKNQVSLTCLVKGFYPSDIAVEWESNGQPENNYKTTPPVLDSDGSFFLYSKLTVDKSRWQQGNVFSCSVMHEALHNHYTQKSLSLSPGKGGSGGSNWVNVISDLKKIEDLIQSMHIDATLYTESDVHPSCKVTAMKCFLLELQVISLESGDASIHDTVENLIILANNSLSSNGNVTESGCKECEELEEKNIKEFLQSFVHIVQMFINTAGGSGGSEPKENLYFQGGGSGGSGGGSITCPPPMSVEHADIWVKSYSLYSRERYICNSGFKRKAGTSSLTECVLNKATNVAHWTTPSLKCIRDPALVHQRPAPPS

SEQ ID NO: 309 - protein, 367 aa, Artificial Sequence
  Made in lab - Fc-ILR fusion protein construct
EPKSSDKTHTCPPCPAPELLGGPSVFLFPPKPKDTLMISRTPEVTCVVVDVSHEDPEVKFNWYVDGVEVHNAKTKPREEQYNSTYRVVSVLTVLHQDWLNGKEYKCKVSNKALPAPIEKTISKAKGQPREPQVYTLPPSREEMTKNQVSLTCLVKGFYPSDIAVEWESNGQPENNYKTTPPVLDSDGSFFLYSKLTVDKSRWQQGNVFSCSVMHEALHNHYTQKSLSLSPGKGGSGGSNWVNVISDLKKIEDLIQSMHIDATLYTESDVHPSCKVTAMKCFLLELQVISLESGDASIHDTVENLIILANNSLSSNGNVTESGCKECEELEEKNIKEFLQSFVHIVQMFINTAGGSGGSEPKENLYFQ

SEQ ID NO: 310 - protein, 89 aa, Artificial Sequence; identical to SEQ ID NO: 304
  Made in lab - ILR fusion protein construct

SEQ ID NO: 311 - protein, 456 aa, Artificial Sequence; identical to SEQ ID NO: 308
  Made in lab - Fc-ILR fusion protein construct

SEQ ID NO: 312 - protein, 367 aa, Artificial Sequence; identical to SEQ ID NO: 309
  Made in lab - Fc-ILR fusion protein construct

SEQ ID NO: 313 - protein, 89 aa, Artificial Sequence; identical to SEQ ID NO: 304
  Made in lab - ILR fusion protein construct

SEQ ID NO: 314 - protein, 462 aa, Artificial Sequence
  Made in lab - Fc-ILR fusion protein construct
EPKSSDKTHTCPPCPAPELLGGPSVFLFPPKPKDTLMISRTPEVTCVVVDVSHEDPEVKFNWYVDGVEVHNAKTKPREEQYNSTYRVVSVLTVLHQDWLNGKEYKCKVSNKALPAPIEKTISKAKGQPREPQVYTLPPSREEMTKNQVSLTCLVKGFYPSDIAVEWESNGQPENNYKTTPPVLDSDGSFFLYSKLTVDKSRWQQGNVFSCSVMHEALHNHYTQKSLSLSPGKGGSGGSGGSGGSNWVNVISDLKKIEDLIQSMHIDATLYTESDVHPSCKVTAMKCFLLELQVISLESGDASIHDTVENLIILANNSLSSNGNVTESGCKECEELEEKNIKEFLQSFVHIVQMFINTAGGSGGSEPKENLYFQGGGSGGSGGGSITCPPPMSVEHADIWVKSYSLYSRERYICNSGFKRKAGTSSLTECVLNKATNVAHWTTPSLKCIRDPALVHQRPAPPS

SEQ ID NO: 315 - protein, 373 aa, Artificial Sequence
  Made in lab - Fc-ILR fusion protein construct
EPKSSDKTHTCPPCPAPELLGGPSVFLFPPKPKDTLMISRTPEVTCVVVDVSHEDPEVKFNWYVDGVEVHNAKTKPREEQYNSTYRVVSVLTVLHQDWLNGKEYKCKVSNKALPAPIEKTISKAKGQPREPQVYTLPPSREEMTKNQVSLTCLVKGFYPSDIAVEWESNGQPENNYKTTPPVLDSDGSFFLYSKLTVDKSRWQQGNVFSCSVMHEALHNHYTQKSLSLSPGKGGSGGSGGSGGSNWVNVISDLKKIEDLIQSMHIDATLYTESDVHPSCKVTAMKCFLLELQVISLESGDASIHDTVENLIILANNSLSSNGNVTESGCKECEELEEKNIKEFLQSFVHIVQMFINTAGGSGGSEPKENLYFQ

SEQ ID NO: 316 - protein, 89 aa, Artificial Sequence; identical to SEQ ID NO: 304
  Made in lab - ILR fusion protein construct

SEQ ID NO: 317 - protein, 462 aa, Artificial Sequence; identical to SEQ ID NO: 314
  Made in lab - Fc-ILR fusion protein construct

SEQ ID NO: 318 - protein, 373 aa, Artificial Sequence; identical to SEQ ID NO: 315
  Made in lab - Fc-ILR fusion protein construct

SEQ ID NO: 319 - protein, 89 aa, Artificial Sequence; identical to SEQ ID NO: 304
  Made in lab - ILR fusion protein construct

SEQ ID NO: 320 - protein, 451 aa, Artificial Sequence
  Made in lab - Fc-ILR fusion protein construct
EPKSSDKTHTCPPCPAPELLGGPSVFLFPPKPKDTLMISRTPEVTCVVVDVSHEDPEVKFNWYVDGVEVHNAKTKPREEQYNSTYRVVSVLTVLHQDWLNGKEYKCKVSNKALPAPIEKTISKAKGQPREPQVYTLPPSREEMTKNQVSLTCLVKGFYPSDIAVEWESNGQPENNYKTTPPVLDSDGSFFLYSKLTVDKSRWQQGNVFSCSVMHEALHNHYTQKSLSLSPGKGNWVNVISDLKKIEDLIQSMHIDATLYTESDVHPSCKVTAMKCFLLELQVISCESGDASIHDTVENLIILANNSLSSNGNVTESGCKECEELEEKNIKEFLQSFVHIVQMFINTAGGSGGSEPKENLYFQGGGSGGSGGGSITCPPPMSVEHADIWVKSYSLYSRERYICNSGFKRKAGTCSLTECVLNKATNVAHWTTPSLKCIRDPALVHQRPAPPS

SEQ ID NO: 321 - protein, 362 aa, Artificial Sequence
  Made in lab - Fc-ILR fusion protein construct
EPKSSDKTHTCPPCPAPELLGGPSVFLFPPKPKDTLMISRTPEVTCVVVDVSHEDPEVKFNWYVDGVEVHNAKTKPREEQYNSTYRVVSVLTVLHQDWLNGKEYKCKVSNKALPAPIEKTISKAKGQPREPQVYTLPPSREEMTKNQVSLTCLVKGFYPSDIAVEWESNGQPENNYKTTPPVLDSDGSFFLYSKLTVDKSRWQQGNVFSCSVMHEALHNHYTQKSLSLSPGKGNWVNVISDLKKIEDLIQSMHIDATLYTESDVHPSCKVTAMKCFLLELQVISCESGDASIHDTVENLIILANNSLSSNGNVTESGCKECEELEEKNIKEFLQSFVHIVQMFINTAGGSGGSEPKENLYFQ

SEQ ID NO: 322 - protein, 89 aa, Artificial Sequence
  Made in lab - ILR fusion protein construct
GGGSGGSGGGSITCPPPMSVEHADIWVKSYSLYSRERYICNSGFKRKAGTCSLTECVLNKATNVAHWTTPSLKCIRDPALVHQRPAPPS

SEQ ID NO: 323 - protein, 451 aa, Artificial Sequence; identical to SEQ ID NO: 320
  Made in lab - Fc-ILR fusion protein construct

SEQ ID NO: 324 - protein, 362 aa, Artificial Sequence; identical to SEQ ID NO: 321
  Made in lab - Fc-ILR fusion protein construct

SEQ ID NO: 325 - protein, 89 aa, Artificial Sequence; identical to SEQ ID NO: 322
  Made in lab - ILR fusion protein construct

SEQ ID NO: 326 - protein, 456 aa, Artificial Sequence
  Made in lab - Fc-ILR fusion protein construct
EPKSSDKTHTCPPCPAPELLGGPSVFLFPPKPKDTLMISRTPEVTCVVVDVSHEDPEVKFNWYVDGVEVHNAKTKPREEQYNSTYRVVSVLTVLHQDWLNGKEYKCKVSNKALPAPIEKTISKAKGQPREPQVYTLPPSREEMTKNQVSLTCLVKGFYPSDIAVEWESNGQPENNYKTTPPVLDSDGSFFLYSKLTVDKSRWQQGNVFSCSVMHEALHNHYTQKSLSLSPGKGGSGGSNWVNVISDLKKIEDLIQSMHIDATLYTESDVHPSCKVTAMKCFLLELQVISCESGDASIHDTVENLIILANNSLSSNGNVTESGCKECEELEEKNIKEFLQSFVHIVQMFINTAGGSGGSEPKENLYFQGGGSGGSGGGSITCPPPMSVEHADIWVKSYSLYSRERYICNSGFKRKAGTCSLTECVLNKATNVAHWTTPSLKCIRDPALVHQRPAPPS

SEQ ID NO: 327 - protein, 367 aa, Artificial Sequence
  Made in lab - Fc-ILR fusion protein construct
EPKSSDKTHTCPPCPAPELLGGPSVFLFPPKPKDTLMISRTPEVTCVVVDVSHEDPEVKFNWYVDGVEVHNAKTKPREEQYNSTYRVVSVLTVLHQDWLNGKEYKCKVSNKALPAPIEKTISKAKGQPREPQVYTLPPSREEMTKNQVSLTCLVKGFYPSDIAVEWESNGQPENNYKTTPPVLDSDGSFFLYSKLTVDKSRWQQGNVFSCSVMHEALHNHYTQKSLSLSPGKGGSGGSNWVNVISDLKKIEDLIQSMHIDATLYTESDVHPSCKVTAMKCFLLELQVISCESGDASIHDTVENLIILANNSLSSNGNVTESGCKECEELEEKNIKEFLQSFVHIVQMFINTAGGSGGSEPKENLYFQ

SEQ ID NO: 328 - protein, 89 aa, Artificial Sequence; identical to SEQ ID NO: 322
  Made in lab - ILR fusion protein construct

SEQ ID NO: 329 - protein, 456 aa, Artificial Sequence; identical to SEQ ID NO: 326
  Made in lab - Fc-ILR fusion protein construct

SEQ ID NO: 330 - protein, 367 aa, Artificial Sequence; identical to SEQ ID NO: 327
  Made in lab - Fc-ILR fusion protein construct

SEQ ID NO: 331 - protein, 89 aa, Artificial Sequence; identical to SEQ ID NO: 322
  Made in lab - ILR fusion protein construct

SEQ ID NO: 332 - protein, 462 aa, Artificial Sequence
  Made in lab - Fc-ILR fusion protein construct
EPKSSDKTHTCPPCPAPELLGGPSVFLFPPKPKDTLMISRTPEVTCVVVDVSHEDPEVKFNWYVDGVEVHNAKTKPREEQYNSTYRVVSVLTVLHQDWLNGKEYKCKVSNKALPAPIEKTISKAKGQPREPQVYTLPPSREEMTKNQVSLTCLVKGFYPSDIAVEWESNGQPENNYKTTPPVLDSDGSFFLYSKLTVDKSRWQQGNVFSCSVMHEALHNHYTQKSLSLSPGKGGSGGSGGSGGSNWVNVISDLKKIEDLIQSMHIDATLYTESDVHPSCKVTAMKCFLLELQVISCESGDASIHDTVENLIILANNSLSSNGNVTESGCKECEELEEKNIKEFLQSFVHIVQMFINTAGGSGGSEPKENLYFQGGGSGGSGGGSITCPPPMSVEHADIWVKSYSLYSRERYICNSGFKRKAGTCSLTECVLNKATNVAHWTTPSLKCIRDPALVHQRPAPPS

SEQ ID NO: 333 - protein, 373 aa, Artificial Sequence
  Made in lab - Fc-ILR fusion protein construct
EPKSSDKTHTCPPCPAPELLGGPSVFLFPPKPKDTLMISRTPEVTCVVVDVSHEDPEVKFNWYVDGVEVHNAKTKPREEQYNSTYRVVSVLTVLHQDWLNGKEYKCKVSNKALPAPIEKTISKAKGQPREPQVYTLPPSREEMTKNQVSLTCLVKGFYPSDIAVEWESNGQPENNYKTTPPVLDSDGSFFLYSKLTVDKSRWQQGNVFSCSVMHEALHNHYTQKSLSLSPGKGGSGGSGGSGGSNWVNVISDLKKIEDLIQSMHIDATLYTESDVHPSCKVTAMKCFLLELQVISCESGDASIHDTVENLIILANNSLSSNGNVTESGCKECEELEEKNIKEFLQSFVHIVQMFINTAGGSGGSEPKENLYFQ

SEQ ID NO: 334 - protein, 89 aa, Artificial Sequence; identical to SEQ ID NO: 322
  Made in lab - ILR fusion protein construct

SEQ ID NO: 335 - protein, 462 aa, Artificial Sequence; identical to SEQ ID NO: 332
  Made in lab - Fc-ILR fusion protein construct

SEQ ID NO: 336 - protein, 373 aa, Artificial Sequence; identical to SEQ ID NO: 333
  Made in lab - Fc-ILR fusion protein construct

SEQ ID NO: 337 - protein, 89 aa, Artificial Sequence; identical to SEQ ID NO: 322
  Made in lab - ILR fusion protein construct

SEQ ID NO: 338 - protein, 456 aa, Artificial Sequence
  Made in lab - Fc-ILR fusion protein construct
EPKSSDKTHTCPPCPAPEAAGGPSVFLFPPKPKDTLYITREPEVTCVVVDVSHEDPEVKFNWYVDGVEVHNAKTKPREEQYNSTYRVVSVLTVLHQDWLNGKEYKCKVSNKALAAPIEKTISKAKGQPREPQVYTLPPSREEMTKNQVSLTCLVKGFYPSDIAVEWESNGQPENNYKTTPPVLDSDGSFFLYSKLTVDKSRWQQGNVFSCSVMHEALHNHYTQKSLSLSPGKGPLGLAGRSANPGPASGNWVNVISDLKKIEDLIQSMHIDATLYTESDVHPSCKVTAMKCFLLELQVISLESGDASIHDTVENLIILANNSLSSNGNVTESGCKECEELEEKNIKEFLQSFVHIVQMFINTAGGSGGSGGSGGSGGSITCPPPMSVEHADIWVKSYSLYSRERYICNSGFKRKAGTSSLTECVLNKATNVAHWTTPSLKCIRDPALVHQRPAPPS

SEQ ID NO: 339 - protein, 456 aa, Artificial Sequence
  Made in lab - Fc-ILR fusion protein construct
EPKSSDKTHTCPPCPAPEAAGGPSVFLFPPKPKDTLYITREPEVTCVVVDVSHEDPEVKFNWYVDGVEVHNAKTKPREEQYNSTYRVVSVLTVLHQDWLNGKEYKCKVSNKALAAPIEKTISKAKGQPREPQVYTLPPSREEMTKNQVSLTCLVKGFYPSDIAVEWESNGQPENNYKTTPPVLDSDGSFFLYSKLTVDKSRWQQGNVFSCSVMHEALHNHYTQKSLSLSPGKGPLGLAGRSDNHGPASGNWVNVISDLKKIEDLIQSMHIDATLYTESDVHPSCKVTAMKCFLLELQVISLESGDASIHDTVENLIILANNSLSSNGNVTESGCKECEELEEKNIKEFLQSFVHIVQMFINTAGGSGGSGGSGGSGGSITCPPPMSVEHADIWVKSYSLYSRERYICNSGFKRKAGTSSLTECVLNKATNVAHWTTPSLKCIRDPALVHQRPAPPS

SEQ ID NO: 340 - protein, 456 aa, Artificial Sequence
  Made in lab - Fc-ILR fusion protein construct
EPKSSDKTHTCPPCPAPEAAGGPSVFLFPPKPKDTLYITREPEVTCVVVDVSHEDPEVKFNWYVDGVEVHNAKTKPREEQYNSTYRVVSVLTVLHQDWLNGKEYKCKVSNKALAAPIEKTISKAKGQPREPQVYTLPPSREEMTKNQVSLTCLVKGFYPSDIAVEWESNGQPENNYKTTPPVLDSDGSFFLYSKLTVDKSRWQQGNVFSCSVMHEALHNHYTQKSLSLSPGKGPLGLAGRSDNPGPASGNWVNVISDLKKIEDLIQSMHIDATLYTESDVHPSCKVTAMKCFLLELQVISLESGDASIHDTVENLIILANNSLSSNGNVTESGCKECEELEEKNIKEFLQSFVHIVQMFINTAGGSGGSGGSGGSGGSITCPPPMSVEHADIWVKSYSLYSRERYICNSGFKRKAGTSSLTECVLNKATNVAHWTTPSLKCIRDPALVHQRPAPPS

SEQ ID NO: 341 - protein, 456 aa, Artificial Sequence
  Made in lab - Fc-ILR fusion protein construct
EPKSSDKTHTCPPCPAPEAAGGPSVFLFPPKPKDTLYITREPEVTCVVVDVSHEDPEVKFNWYVDGVEVHNAKTKPREEQYNSTYRVVSVLTVLHQDWLNGKEYKCKVSNKALAAPIEKTISKAKGQPREPQVYTLPPSREEMTKNQVSLTCLVKGFYPSDIAVEWESNGQPENNYKTTPPVLDSDGSFFLYSKLTVDKSRWQQGNVFSCSVMHEALHNHYTQKSLSLSPGKGPLGLAGRSENPGPASGNWVNVISDLKKIEDLIQSMHIDATLYTESDVHPSCKVTAMKCFLLELQVISLESGDASIHDTVENLIILANNSLSSNGNVTESGCKECEELEEKNIKEFLQSFVHIVQMFINTAGGSGGSGGSGGSGGSITCPPPMSVEHADIWVKSYSLYSRERYICNSGFKRKAGTSSLTECVLNKATNVAHWTTPSLKCIRDPALVHQRPAPPS

SEQ ID NO: 342 - protein, 456 aa, Artificial Sequence
  Made in lab - Fc-ILR fusion protein construct
EPKSSDKTHTCPPCPAPEAAGGPSVFLFPPKPKDTLYITREPEVTCVVVDVSHEDPEVKFNWYVDGVEVHNAKTKPREEQYNSTYRVVSVLTVLHQDWLNGKEYKCKVSNKALAAPIEKTISKAKGQPREPQVYTLPPSREEMTKNQVSLTCLVKGFYPSDIAVEWESNGQPENNYKTTPPVLDSDGSFFLYSKLTVDKSRWQQGNVFSCSVMHEALHNHYTQKSLSLSPGKGPLGLAGRSDNLGPASGNWVNVISDLKKIEDLIQSMHIDATLYTESDVHPSCKVTAMKCFLLELQVISLESGDASIHDTVENLIILANNSLSSNGNVTESGCKECEELEEKNIKEFLQSFVHIVQMFINTAGGSGGSGGSGGSGGSITCPPPMSVEHADIWVKSYSLYSRERYICNSGFKRKAGTSSLTECVLNKATNVAHWTTPSLKCIRDPALVHQRPAPPS

SEQ ID NO: 343 - protein, 456 aa, Artificial Sequence
  Made in lab - Fc-ILR fusion protein construct
EPKSSDKTHTCPPCPAPEAAGGPSVFLFPPKPKDTLYITREPEVTCVVVDVSHEDPEVKFNWYVDGVEVHNAKTKPREEQYNSTYRVVSVLTVLHQDWLNGKEYKCKVSNKALAAPIEKTISKAKGQPREPQVYTLPPSREEMTKNQVSLTCLVKGFYPSDIAVEWESNGQPENNYKTTPPVLDSDGSFFLYSKLTVDKSRWQQGNVFSCSVMHEALHNHYTQKSLSLSPGKGPLGLAGRNAQVGPASGNWVNVISDLKKIEDLIQSMHIDATLYTESDVHPSCKVTAMKCFLLELQVISLESGDASIHDTVENLIILANNSLSSNGNVTESGCKECEELEEKNIKEFLQSFVHIVQMFINTAGGSGGSGGSGGSGGSITCPPPMSVEHADIWVKSYSLYSRERYICNSGFKRKAGTSSLTECVLNKATNVAHWTTPSLKCIRDPALVHQRPAPPS

SEQ ID NO: 344 - protein, 7 aa, Artificial Sequence
  Made in Lab
ENLYFQG

SEQ ID NO: 345 - protein, 15 aa, Artificial Sequene
  Made in Lab - peptide linker
GGSGGSGGSGGSGGS

SEQ ID NO: 346 - protein, 11 aa, Artificial Sequence
  Made in Lab - exemplary cleavable linker
GSENLYFQGGS

SEQ ID NO: 347 - protein, 451 aa, Artificial Sequence
  Made in lab - Fc-ILR fusion protein construct
EPKSSDKTHTCPPCPAPELLGGPSVFLFPPKPKDTLMISRTPEVTCVVVDVSHEDPEVKFNWYVDGVEVHNAKTKPREEQYNSTYRVVSVLTVLHQDWLNGKEYKCKVSNKALPAPIEKTISKAKGQPREPQVYTLPPSREEMTKNQVSLTCLVKGFYPSDIAVEWESNGQPENNYKTTPPVLDSDGSFFLYSKLTVDKSRWQQGNVFSCSVMHEALHNHYTQKSLSLSPGKGSLSGRSDNAGSNWVNVISDLKKIEDLIQSMHIDATLYTESDVHPSCKVTAMKCFLLELQVISLESGDASIHDTVENLIILANNSLSSNGNVTESGCKECEELEEKNIKEFLQSFVHIVQMFINTSGGSGGSGGSGGSGGSITCPPPMSVEHADIWVKSYSLYSRERYICNSGFKRKAGTSSLTECVLNKATNVAHWTTPSLKCIRDPALVHQRPAPPS

SEQ ID NO: 348 - protein, 451 aa, Artificial Sequence
  Made in lab - Fc-ILR fusion protein construct
EPKSSDKTHTCPPCPAPELLGGPSVFLFPPKPKDTLMISRTPEVTCVVVDVSHEDPEVKFNWYVDGVEVHNAKTKPREEQYNSTYRVVSVLTVLHQDWLNGKEYKCKVSNKALPAPIEKTISKAKGQPREPQVYTLPPSREEMTKNQVSLTCLVKGFYPSDIAVEWESNGQPENNYKTTPPVLDSDGSFFLYSKLTVDKSRWQQGNVFSCSVMHEALHNHYTQKSLSLSPGKGSLSGRSDNDGSNWVNVISDLKKIEDLIQSMHIDATLYTESDVHPSCKVTAMKCFLLELQVISLESGDASIHDTVENLIILANNSLSSNGNVTESGCKECEELEEKNIKEFLQSFVHIVQMFINTSGGSGGSGGSGGSGGSITCPPPMSVEHADIWVKSYSLYSRERYICNSGFKRKAGTSSLTECVLNKATNVAHWTTPSLKCIRDPALVHQRPAPPS

SEQ ID NO: 349 - protein, 451 aa, Artificial Sequence
  Made in lab - Fc-ILR fusion protein construct
EPKSSDKTHTCPPCPAPELLGGPSVFLFPPKPKDTLMISRTPEVTCVVVDVSHEDPEVKFNWYVDGVEVHNAKTKPREEQYNSTYRVVSVLTVLHQDWLNGKEYKCKVSNKALPAPIEKTISKAKGQPREPQVYTLPPSREEMTKNQVSLTCLVKGFYPSDIAVEWESNGQPENNYKTTPPVLDSDGSFFLYSKLTVDKSRWQQGNVFSCSVMHEALHNHYTQKSLSLSPGKGSLSGRSDNEGSNWVNVISDLKKIEDLIQSMHIDATLYTESDVHPSCKVTAMKCFLLELQVISLESGDASIHDTVENLIILANNSLSSNGNVTESGCKECEELEEKNIKEFLQSFVHIVQMFINTSGGSGGSGGSGGSGGSITCPPPMSVEHADIWVKSYSLYSRERYICNSGFKRKAGTSSLTECVLNKATNVAHWTTPSLKCIRDPALVHQRPAPPS

SEQ ID NO: 350 - protein, 451 aa, Artificial Sequence
  Made in lab - Fc-ILR fusion protein construct
EPKSSDKTHTCPPCPAPELLGGPSVFLFPPKPKDTLMISRTPEVTCVVVDVSHEDPEVKFNWYVDGVEVHNAKTKPREEQYNSTYRVVSVLTVLHQDWLNGKEYKCKVSNKALPAPIEKTISKAKGQPREPQVYTLPPSREEMTKNQVSLTCLVKGFYPSDIAVEWESNGQPENNYKTTPPVLDSDGSFFLYSKLTVDKSRWQQGNVFSCSVMHEALHNHYTQKSLSLSPGKGSLSGRSDNFGSNWVNVISDLKKIEDLIQSMHIDATLYTESDVHPSCKVTAMKCFLLELQVISLESGDASIHDTVENLIILANNSLSSNGNVTESGCKECEELEEKNIKEFLQSFVHIVQMFINTSGGSGGSGGSGGSGGSITCPPPMSVEHADIWVKSYSLYSRERYICNSGFKRKAGTSSLTECVLNKATNVAHWTTPSLKCIRDPALVHQRPAPPS

SEQ ID NO: 351 - protein, 451 aa, Artificial Sequence
  Made in lab - Fc-ILR fusion protein construct
EPKSSDKTHTCPPCPAPELLGGPSVFLFPPKPKDTLMISRTPEVTCVVVDVSHEDPEVKFNWYVDGVEVHNAKTKPREEQYNSTYRVVSVLTVLHQDWLNGKEYKCKVSNKALPAPIEKTISKAKGQPREPQVYTLPPSREEMTKNQVSLTCLVKGFYPSDIAVEWESNGQPENNYKTTPPVLDSDGSFFLYSKLTVDKSRWQQGNVFSCSVMHEALHNHYTQKSLSLSPGKGSLSGRSDNGGSNWVNVISDLKKIEDLIQSMHIDATLYTESDVHPSCKVTAMKCFLLELQVISLESGDASIHDTVENLIILANNSLSSNGNVTESGCKECEELEEKNIKEFLQSFVHIVQMFINTSGGSGGSGGSGGSGGSITCPPPMSVEHADIWVKSYSLYSRERYICNSGFKRKAGTSSLTECVLNKATNVAHWTTPSLKCIRDPALVHQRPAPPS

SEQ ID NO: 352 - protein, 451 aa, Artificial Sequence
  Made in lab - Fc-ILR fusion protein construct
EPKSSDKTHTCPPCPAPELLGGPSVFLFPPKPKDTLMISRTPEVTCVVVDVSHEDPEVKFNWYVDGVEVHNAKTKPREEQYNSTYRVVSVLTVLHQDWLNGKEYKCKVSNKALPAPIEKTISKAKGQPREPQVYTLPPSREEMTKNQVSLTCLVKGFYPSDIAVEWESNGQPENNYKTTPPVLDSDGSFFLYSKLTVDKSRWQQGNVFSCSVMHEALHNHYTQKSLSLSPGKGSLSGRSDNIGSNWVNVISDLKKIEDLIQSMHIDATLYTESDVHPSCKVTAMKCFLLELQVISLESGDASIHDTVENLIILANNSLSSNGNVTESGCKECEELEEKNIKEFLQSFVHIVQMFINTSGGSGGSGGSGGSGGSITCPPPMSVEHADIWVKSYSLYSRERYICNSGFKRKAGTSSLTECVLNKATNVAHWTTPSLKCIRDPALVHQRPAPPS

SEQ ID NO: 353 - protein, 451 aa, Artificial Sequence
  Made in lab - Fc-ILR fusion protein construct
EPKSSDKTHTCPPCPAPELLGGPSVFLFPPKPKDTLMISRTPEVTCVVVDVSHEDPEVKFNWYVDGVEVHNAKTKPREEQYNSTYRVVSVLTVLHQDWLNGKEYKCKVSNKALPAPIEKTISKAKGQPREPQVYTLPPSREEMTKNQVSLTCLVKGFYPSDIAVEWESNGQPENNYKTTPPVLDSDGSFFLYSKLTVDKSRWQQGNVFSCSVMHEALHNHYTQKSLSLSPGKGSLSGRSDNKGSNWVNVISDLKKIEDLIQSMHIDATLYTESDVHPSCKVTAMKCFLLELQVISLESGDASIHDTVENLIILANNSLSSNGNVTESGCKECEELEEKNIKEFLQSFVHIVQMFINTSGGSGGSGGSGGSGGSITCPPPMSVEHADIWVKSYSLYSRERYICNSGFKRKAGTSSLTECVLNKATNVAHWTTPSLKCIRDPALVHQRPAPPS

SEQ ID NO: 354 - protein, 451 aa, Artificial Sequence
  Made in lab - Fc-ILR fusion protein construct
EPKSSDKTHTCPPCPAPELLGGPSVFLFPPKPKDTLMISRTPEVTCVVVDVSHEDPEVKFNWYVDGVEVHNAKTKPREEQYNSTYRVVSVLTVLHQDWLNGKEYKCKVSNKALPAPIEKTISKAKGQPREPQVYTLPPSREEMTKNQVSLTCLVKGFYPSDIAVEWESNGQPENNYKTTPPVLDSDGSFFLYSKLTVDKSRWQQGNVFSCSVMHEALHNHYTQKSLSLSPGKGSLSGRSDNLGSNWVNVISDLKKIEDLIQSMHIDATLYTESDVHPSCKVTAMKCFLLELQVISLESGDASIHDTVENLIILANNSLSSNGNVTESGCKECEELEEKNIKEFLQSFVHIVQMFINTSGGSGGSGGSGGSGGSITCPPPMSVEHADIWVKSYSLYSRERYICNSGFKRKAGTSSLTECVLNKATNVAHWTTPSLKCIRDPALVHQRPAPPS

SEQ ID NO: 355 - protein, 451 aa, Artificial Sequence
  Made in lab - Fc-ILR fusion protein construct
EPKSSDKTHTCPPCPAPELLGGPSVFLFPPKPKDTLMISRTPEVTCVVVDVSHEDPEVKFNWYVDGVEVHNAKTKPREEQYNSTYRVVSVLTVLHQDWLNGKEYKCKVSNKALPAPIEKTISKAKGQPREPQVYTLPPSREEMTKNQVSLTCLVKGFYPSDIAVEWESNGQPENNYKTTPPVLDSDGSFFLYSKLTVDKSRWQQGNVFSCSVMHEALHNHYTQKSLSLSPGKGSLSGRSDNMGSNWVNVISDLKKIEDLIQSMHIDATLYTESDVHPSCKVTAMKCFLLELQVISLESGDASIHDTVENLIILANNSLSSNGNVTESGCKECEELEEKNIKEFLQSFVHIVQMFINTSGGSGGSGGSGGSGGSITCPPPMSVEHADIWVKSYSLYSRERYICNSGFKRKAGTSSLTECVLNKATNVAHWTTPSLKCIRDPALVHQRPAPPS

SEQ ID NO: 356 - protein, 451 aa, Artificial Sequence
  Made in lab - Fc-ILR fusion protein construct
EPKSSDKTHTCPPCPAPELLGGPSVFLFPPKPKDTLMISRTPEVTCVVVDVSHEDPEVKFNWYVDGVEVHNAKTKPREEQYNSTYRVVSVLTVLHQDWLNGKEYKCKVSNKALPAPIEKTISKAKGQPREPQVYTLPPSREEMTKNQVSLTCLVKGFYPSDIAVEWESNGQPENNYKTTPPVLDSDGSFFLYSKLTVDKSRWQQGNVFSCSVMHEALHNHYTQKSLSLSPGKGSLSGRSDNNGSNWVNVISDLKKIEDLIQSMHIDATLYTESDVHPSCKVTAMKCFLLELQVISLESGDASIHDTVENLIILANNSLSSNGNVTESGCKECEELEEKNIKEFLQSFVHIVQMFINTSGGSGGSGGSGGSGGSITCPPPMSVEHADIWVKSYSLYSRERYICNSGFKRKAGTSSLTECVLNKATNVAHWTTPSLKCIRDPALVHQRPAPPS

SEQ ID NO: 357 - protein, 451 aa, Artificial Sequence
  Made in lab - Fc-ILR fusion protein construct
EPKSSDKTHTCPPCPAPELLGGPSVFLFPPKPKDTLMISRTPEVTCVVVDVSHEDPEVKFNWYVDGVEVHNAKTKPREEQYNSTYRVVSVLTVLHQDWLNGKEYKCKVSNKALPAPIEKTISKAKGQPREPQVYTLPPSREEMTKNQVSLTCLVKGFYPSDIAVEWESNGQPENNYKTTPPVLDSDGSFFLYSKLTVDKSRWQQGNVFSCSVMHEALHNHYTQKSLSLSPGKGSLSGRSDNPGSNWVNVISDLKKIEDLIQSMHIDATLYTESDVHPSCKVTAMKCFLLELQVISLESGDASIHDTVENLIILANNSLSSNGNVTESGCKECEELEEKNIKEFLQSFVHIVQMFINTSGGSGGSGGSGGSGGSITCPPPMSVEHADIWVKSYSLYSRERYICNSGFKRKAGTSSLTECVLNKATNVAHWTTPSLKCIRDPALVHQRPAPPS

SEQ ID NO: 358 - protein, 451 aa, Artificial Sequence
  Made in lab - Fc-ILR fusion protein construct
EPKSSDKTHTCPPCPAPELLGGPSVFLFPPKPKDTLMISRTPEVTCVVVDVSHEDPEVKFNWYVDGVEVHNAKTKPREEQYNSTYRVVSVLTVLHQDWLNGKEYKCKVSNKALPAPIEKTISKAKGQPREPQVYTLPPSREEMTKNQVSLTCLVKGFYPSDIAVEWESNGQPENNYKTTPPVLDSDGSFFLYSKLTVDKSRWQQGNVFSCSVMHEALHNHYTQKSLSLSPGKGSLSGRSDNQGSNWVNVISDLKKIEDLIQSMHIDATLYTESDVHPSCKVTAMKCFLLELQVISLESGDASIHDTVENLIILANNSLSSNGNVTESGCKECEELEEKNIKEFLQSFVHIVQMFINTSGGSGGSGGSGGSGGSITCPPPMSVEHADIWVKSYSLYSRERYICNSGFKRKAGTSSLTECVLNKATNVAHWTTPSLKCIRDPALVHQRPAPPS

SEQ ID NO: 359 - protein, 451 aa, Artificial Sequence
  Made in lab - Fc-ILR fusion protein construct
EPKSSDKTHTCPPCPAPELLGGPSVFLFPPKPKDTLMISRTPEVTCVVVDVSHEDPEVKFNWYVDGVEVHNAKTKPREEQYNSTYRVVSVLTVLHQDWLNGKEYKCKVSNKALPAPIEKTISKAKGQPREPQVYTLPPSREEMTKNQVSLTCLVKGFYPSDIAVEWESNGQPENNYKTTPPVLDSDGSFFLYSKLTVDKSRWQQGNVFSCSVMHEALHNHYTQKSLSLSPGKGSLSGRSDNRGSNWVNVISDLKKIEDLIQSMHIDATLYTESDVHPSCKVTAMKCFLLELQVISLESGDASIHDTVENLIILANNSLSSNGNVTESGCKECEELEEKNIKEFLQSFVHIVQMFINTSGGSGGSGGSGGSGGSITCPPPMSVEHADIWVKSYSLYSRERYICNSGFKRKAGTSSLTECVLNKATNVAHWTTPSLKCIRDPALVHQRPAPPS

SEQ ID NO: 360 - protein, 451 aa, Artificial Sequence
  Made in lab - Fc-ILR fusion protein construct
EPKSSDKTHTCPPCPAPELLGGPSVFLFPPKPKDTLMISRTPEVTCVVVDVSHEDPEVKFNWYVDGVEVHNAKTKPREEQYNSTYRVVSVLTVLHQDWLNGKEYKCKVSNKALPAPIEKTISKAKGQPREPQVYTLPPSREEMTKNQVSLTCLVKGFYPSDIAVEWESNGQPENNYKTTPPVLDSDGSFFLYSKLTVDKSRWQQGNVFSCSVMHEALHNHYTQKSLSLSPGKGSLSGRSDNSGSNWVNVISDLKKIEDLIQSMHIDATLYTESDVHPSCKVTAMKCFLLELQVISLESGDASIHDTVENLIILANNSLSSNGNVTESGCKECEELEEKNIKEFLQSFVHIVQMFINTSGGSGGSGGSGGSGGSITCPPPMSVEHADIWVKSYSLYSRERYICNSGFKRKAGTSSLTECVLNKATNVAHWTTPSLKCIRDPALVHQRPAPPS

SEQ ID NO: 361 - protein, 451 aa, Artificial Sequence
  Made in lab - Fc-ILR fusion protein construct
EPKSSDKTHTCPPCPAPELLGGPSVFLFPPKPKDTLMISRTPEVTCVVVDVSHEDPEVKFNWYVDGVEVHNAKTKPREEQYNSTYRVVSVLTVLHQDWLNGKEYKCKVSNKALPAPIEKTISKAKGQPREPQVYTLPPSREEMTKNQVSLTCLVKGFYPSDIAVEWESNGQPENNYKTTPPVLDSDGSFFLYSKLTVDKSRWQQGNVFSCSVMHEALHNHYTQKSLSLSPGKGSLSGRSDNTGSNWVNVISDLKKIEDLIQSMHIDATLYTESDVHPSCKVTAMKCFLLELQVISLESGDASIHDTVENLIILANNSLSSNGNVTESGCKECEELEEKNIKEFLQSFVHIVQMFINTSGGSGGSGGSGGSGGSITCPPPMSVEHADIWVKSYSLYSRERYICNSGFKRKAGTSSLTECVLNKATNVAHWTTPSLKCIRDPALVHQRPAPPS

SEQ ID NO: 362 - protein, 451 aa, Artificial Sequence
  Made in lab - Fc-ILR fusion protein construct
EPKSSDKTHTCPPCPAPELLGGPSVFLFPPKPKDTLMISRTPEVTCVVVDVSHEDPEVKFNWYVDGVEVHNAKTKPREEQYNSTYRVVSVLTVLHQDWLNGKEYKCKVSNKALPAPIEKTISKAKGQPREPQVYTLPPSREEMTKNQVSLTCLVKGFYPSDIAVEWESNGQPENNYKTTPPVLDSDGSFFLYSKLTVDKSRWQQGNVFSCSVMHEALHNHYTQKSLSLSPGKGSLSGRSDNVGSNWVNVISDLKKIEDLIQSMHIDATLYTESDVHPSCKVTAMKCFLLELQVISLESGDASIHDTVENLIILANNSLSSNGNVTESGCKECEELEEKNIKEFLQSFVHIVQMFINTSGGSGGSGGSGGSGGSITCPPPMSVEHADIWVKSYSLYSRERYICNSGFKRKAGTSSLTECVLNKATNVAHWTTPSLKCIRDPALVHQRPAPPS

SEQ ID NO: 363 - protein, 451 aa, Artificial Sequence
  Made in lab - Fc-ILR fusion protein construct
EPKSSDKTHTCPPCPAPELLGGPSVFLFPPKPKDTLMISRTPEVTCVVVDVSHEDPEVKFNWYVDGVEVHNAKTKPREEQYNSTYRVVSVLTVLHQDWLNGKEYKCKVSNKALPAPIEKTISKAKGQPREPQVYTLPPSREEMTKNQVSLTCLVKGFYPSDIAVEWESNGQPENNYKTTPPVLDSDGSFFLYSKLTVDKSRWQQGNVFSCSVMHEALHNHYTQKSLSLSPGKGSLSGRSDNWGSNWVNVISDLKKIEDLIQSMHIDATLYTESDVHPSCKVTAMKCFLLELQVISLESGDASIHDTVENLIILANNSLSSNGNVTESGCKECEELEEKNIKEFLQSFVHIVQMFINTSGGSGGSGGSGGSGGSITCPPPMSVEHADIWVKSYSLYSRERYICNSGFKRKAGTSSLTECVLNKATNVAHWTTPSLKCIRDPALVHQRPAPPS

SEQ ID NO: 364 - protein, 451 aa, Artificial Sequence
  Made in lab - Fc-ILR fusion protein construct
EPKSSDKTHTCPPCPAPELLGGPSVFLFPPKPKDTLMISRTPEVTCVVVDVSHEDPEVKFNWYVDGVEVHNAKTKPREEQYNSTYRVVSVLTVLHQDWLNGKEYKCKVSNKALPAPIEKTISKAKGQPREPQVYTLPPSREEMTKNQVSLTCLVKGFYPSDIAVEWESNGQPENNYKTTPPVLDSDGSFFLYSKLTVDKSRWQQGNVFSCSVMHEALHNHYTQKSLSLSPGKGSLSGRSDNYGSNWVNVISDLKKIEDLIQSMHIDATLYTESDVHPSCKVTAMKCFLLELQVISLESGDASIHDTVENLIILANNSLSSNGNVTESGCKECEELEEKNIKEFLQSFVHIVQMFINTSGGSGGSGGSGGSGGSITCPPPMSVEHADIWVKSYSLYSRERYICNSGFKRKAGTSSLTECVLNKATNVAHWTTPSLKCIRDPALVHQRPAPPS

SEQ ID NO: 365 - protein, 451 aa, Artificial Sequence
  Made in lab - Fc-ILR fusion protein construct
EPKSSDKTHTCPPCPAPELLGGPSVFLFPPKPKDTLMISRTPEVTCVVVDVSHEDPEVKFNWYVDGVEVHNAKTKPREEQYNSTYRVVSVLTVLHQDWLNGKEYKCKVSNKALPAPIEKTISKAKGQPREPQVYTLPPSREEMTKNQVSLTCLVKGFYPSDIAVEWESNGQPENNYKTTPPVLDSDGSFFLYSKLTVDKSRWQQGNVFSCSVMHEALHNHYTQKSLSLSPGKGSLSGRSANDGSNWVNVISDLKKIEDLIQSMHIDATLYTESDVHPSCKVTAMKCFLLELQVISLESGDASIHDTVENLIILANNSLSSNGNVTESGCKECEELEEKNIKEFLQSFVHIVQMFINTSGGSGGSGGSGGSGGSITCPPPMSVEHADIWVKSYSLYSRERYICNSGFKRKAGTSSLTECVLNKATNVAHWTTPSLKCIRDPALVHQRPAPPS

SEQ ID NO: 366 - protein, 451 aa, Artificial Sequence
  Made in lab - Fc-ILR fusion protein construct
EPKSSDKTHTCPPCPAPELLGGPSVFLFPPKPKDTLMISRTPEVTCVVVDVSHEDPEVKFNWYVDGVEVHNAKTKPREEQYNSTYRVVSVLTVLHQDWLNGKEYKCKVSNKALPAPIEKTISKAKGQPREPQVYTLPPSREEMTKNQVSLTCLVKGFYPSDIAVEWESNGQPENNYKTTPPVLDSDGSFFLYSKLTVDKSRWQQGNVFSCSVMHEALHNHYTQKSLSLSPGKGSLSGRSANEGSNWVNVISDLKKIEDLIQSMHIDATLYTESDVHPSCKVTAMKCFLLELQVISLESGDASIHDTVENLIILANNSLSSNGNVTESGCKECEELEEKNIKEFLQSFVHIVQMFINTSGGSGGSGGSGGSGGSITCPPPMSVEHADIWVKSYSLYSRERYICNSGFKRKAGTSSLTECVLNKATNVAHWTTPSLKCIRDPALVHQRPAPPS

SEQ ID NO: 367 - protein, 451 aa, Artificial Sequence
  Made in lab - Fc-ILR fusion protein construct
EPKSSDKTHTCPPCPAPELLGGPSVFLFPPKPKDTLMISRTPEVTCVVVDVSHEDPEVKFNWYVDGVEVHNAKTKPREEQYNSTYRVVSVLTVLHQDWLNGKEYKCKVSNKALPAPIEKTISKAKGQPREPQVYTLPPSREEMTKNQVSLTCLVKGFYPSDIAVEWESNGQPENNYKTTPPVLDSDGSFFLYSKLTVDKSRWQQGNVFSCSVMHEALHNHYTQKSLSLSPGKGSLSGRSANFGSNWVNVISDLKKIEDLIQSMHIDATLYTESDVHPSCKVTAMKCFLLELQVISLESGDASIHDTVENLIILANNSLSSNGNVTESGCKECEELEEKNIKEFLQSFVHIVQMFINTSGGSGGSGGSGGSGGSITCPPPMSVEHADIWVKSYSLYSRERYICNSGFKRKAGTSSLTECVLNKATNVAHWTTPSLKCIRDPALVHQRPAPPS

SEQ ID NO: 368 - protein, 451 aa, Artificial Sequence
  Made in lab - Fc-ILR fusion protein construct
EPKSSDKTHTCPPCPAPELLGGPSVFLFPPKPKDTLMISRTPEVTCVVVDVSHEDPEVKFNWYVDGVEVHNAKTKPREEQYNSTYRVVSVLTVLHQDWLNGKEYKCKVSNKALPAPIEKTISKAKGQPREPQVYTLPPSREEMTKNQVSLTCLVKGFYPSDIAVEWESNGQPENNYKTTPPVLDSDGSFFLYSKLTVDKSRWQQGNVFSCSVMHEALHNHYTQKSLSLSPGKGSLSGRSANGGSNWVNVISDLKKIEDLIQSMHIDATLYTESDVHPSCKVTAMKCFLLELQVISLESGDASIHDTVENLIILANNSLSSNGNVTESGCKECEELEEKNIKEFLQSFVHIVQMFINTSGGSGGSGGSGGSGGSITCPPPMSVEHADIWVKSYSLYSRERYICNSGFKRKAGTSSLTECVLNKATNVAHWTTPSLKCIRDPALVHQRPAPPS

SEQ ID NO: 369 - protein, 451 aa, Artificial Sequence
  Made in lab - Fc-ILR fusion protein construct
EPKSSDKTHTCPPCPAPELLGGPSVFLFPPKPKDTLMISRTPEVTCVVVDVSHEDPEVKFNWYVDGVEVHNAKTKPREEQYNSTYRVVSVLTVLHQDWLNGKEYKCKVSNKALPAPIEKTISKAKGQPREPQVYTLPPSREEMTKNQVSLTCLVKGFYPSDIAVEWESNGQPENNYKTTPPVLDSDGSFFLYSKLTVDKSRWQQGNVFSCSVMHEALHNHYTQKSLSLSPGKGSLSGRSANHGSNWVNVISDLKKIEDLIQSMHIDATLYTESDVHPSCKVTAMKCFLLELQVISLESGDASIHDTVENLIILANNSLSSNGNVTESGCKECEELEEKNIKEFLQSFVHIVQMFINTSGGSGGSGGSGGSGGSITCPPPMSVEHADIWVKSYSLYSRERYICNSGFKRKAGTSSLTECVLNKATNVAHWTTPSLKCIRDPALVHQRPAPPS

SEQ ID NO: 370 - protein, 451 aa, Artificial Sequence
  Made in lab - Fc-ILR fusion protein construct
EPKSSDKTHTCPPCPAPELLGGPSVFLFPPKPKDTLMISRTPEVTCVVVDVSHEDPEVKFNWYVDGVEVHNAKTKPREEQYNSTYRVVSVLTVLHQDWLNGKEYKCKVSNKALPAPIEKTISKAKGQPREPQVYTLPPSREEMTKNQVSLTCLVKGFYPSDIAVEWESNGQPENNYKTTPPVLDSDGSFFLYSKLTVDKSRWQQGNVFSCSVMHEALHNHYTQKSLSLSPGKGSLSGRSANIGSNWVNVISDLKKIEDLIQSMHIDATLYTESDVHPSCKVTAMKCFLLELQVISLESGDASIHDTVENLIILANNSLSSNGNVTESGCKECEELEEKNIKEFLQSFVHIVQMFINTSGGSGGSGGSGGSGGSITCPPPMSVEHADIWVKSYSLYSRERYICNSGFKRKAGTSSLTECVLNKATNVAHWTTPSLKCIRDPALVHQRPAPPS

SEQ ID NO: 371 - protein, 451 aa, Artificial Sequence
  Made in lab - Fc-ILR fusion protein construct
EPKSSDKTHTCPPCPAPELLGGPSVFLFPPKPKDTLMISRTPEVTCVVVDVSHEDPEVKFNWYVDGVEVHNAKTKPREEQYNSTYRVVSVLTVLHQDWLNGKEYKCKVSNKALPAPIEKTISKAKGQPREPQVYTLPPSREEMTKNQVSLTCLVKGFYPSDIAVEWESNGQPENNYKTTPPVLDSDGSFFLYSKLTVDKSRWQQGNVFSCSVMHEALHNHYTQKSLSLSPGKGSLSGRSANKGSNWVNVISDLKKIEDLIQSMHIDATLYTESDVHPSCKVTAMKCFLLELQVISLESGDASIHDTVENLIILANNSLSSNGNVTESGCKECEELEEKNIKEFLQSFVHIVQMFINTSGGSGGSGGSGGSGGSITCPPPMSVEHADIWVKSYSLYSRERYICNSGFKRKAGTSSLTECVLNKATNVAHWTTPSLKCIRDPALVHQRPAPPS

SEQ ID NO: 372 - protein, 451 aa, Artificial Sequence
  Made in lab - Fc-ILR fusion protein construct
EPKSSDKTHTCPPCPAPELLGGPSVFLFPPKPKDTLMISRTPEVTCVVVDVSHEDPEVKFNWYVDGVEVHNAKTKPREEQYNSTYRVVSVLTVLHQDWLNGKEYKCKVSNKALPAPIEKTISKAKGQPREPQVYTLPPSREEMTKNQVSLTCLVKGFYPSDIAVEWESNGQPENNYKTTPPVLDSDGSFFLYSKLTVDKSRWQQGNVFSCSVMHEALHNHYTQKSLSLSPGKGSLSGRSANLGSNWVNVISDLKKIEDLIQSMHIDATLYTESDVHPSCKVTAMKCFLLELQVISLESGDASIHDTVENLIILANNSLSSNGNVTESGCKECEELEEKNIKEFLQSFVHIVQMFINTSGGSGGSGGSGGSGGSITCPPPMSVEHADIWVKSYSLYSRERYICNSGFKRKAGTSSLTECVLNKATNVAHWTTPSLKCIRDPALVHQRPAPPS

SEQ ID NO: 373 - protein, 451 aa, Artificial Sequence
  Made in lab - Fc-ILR fusion protein construct
EPKSSDKTHTCPPCPAPELLGGPSVFLFPPKPKDTLMISRTPEVTCVVVDVSHEDPEVKFNWYVDGVEVHNAKTKPREEQYNSTYRVVSVLTVLHQDWLNGKEYKCKVSNKALPAPIEKTISKAKGQPREPQVYTLPPSREEMTKNQVSLTCLVKGFYPSDIAVEWESNGQPENNYKTTPPVLDSDGSFFLYSKLTVDKSRWQQGNVFSCSVMHEALHNHYTQKSLSLSPGKGSLSGRSANMGSNWVNVISDLKKIEDLIQSMHIDATLYTESDVHPSCKVTAMKCFLLELQVISLESGDASIHDTVENLIILANNSLSSNGNVTESGCKECEELEEKNIKEFLQSFVHIVQMFINTSGGSGGSGGSGGSGGSITCPPPMSVEHADIWVKSYSLYSRERYICNSGFKRKAGTSSLTECVLNKATNVAHWTTPSLKCIRDPALVHQRPAPPS

SEQ ID NO: 374 - protein, 451 aa, Artificial Sequence
  Made in lab - Fc-ILR fusion protein construct
EPKSSDKTHTCPPCPAPELLGGPSVFLFPPKPKDTLMISRTPEVTCVVVDVSHEDPEVKFNWYVDGVEVHNAKTKPREEQYNSTYRVVSVLTVLHQDWLNGKEYKCKVSNKALPAPIEKTISKAKGQPREPQVYTLPPSREEMTKNQVSLTCLVKGFYPSDIAVEWESNGQPENNYKTTPPVLDSDGSFFLYSKLTVDKSRWQQGNVFSCSVMHEALHNHYTQKSLSLSPGKGSLSGRSANNGSNWVNVISDLKKIEDLIQSMHIDATLYTESDVHPSCKVTAMKCFLLELQVISLESGDASIHDTVENLIILANNSLSSNGNVTESGCKECEELEEKNIKEFLQSFVHIVQMFINTSGGSGGSGGSGGSGGSITCPPPMSVEHADIWVKSYSLYSRERYICNSGFKRKAGTSSLTECVLNKATNVAHWTTPSLKCIRDPALVHQRPAPPS

SEQ ID NO: 375 - protein, 451 aa, Artificial Sequence
  Made in lab - Fc-ILR fusion protein construct
EPKSSDKTHTCPPCPAPELLGGPSVFLFPPKPKDTLMISRTPEVTCVVVDVSHEDPEVKFNWYVDGVEVHNAKTKPREEQYNSTYRVVSVLTVLHQDWLNGKEYKCKVSNKALPAPIEKTISKAKGQPREPQVYTLPPSREEMTKNQVSLTCLVKGFYPSDIAVEWESNGQPENNYKTTPPVLDSDGSFFLYSKLTVDKSRWQQGNVFSCSVMHEALHNHYTQKSLSLSPGKGSLSGRSANPGSNWVNVISDLKKIEDLIQSMHIDATLYTESDVHPSCKVTAMKCFLLELQVISLESGDASIHDTVENLIILANNSLSSNGNVTESGCKECEELEEKNIKEFLQSFVHIVQMFINTSGGSGGSGGSGGSGGSITCPPPMSVEHADIWVKSYSLYSRERYICNSGFKRKAGTSSLTECVLNKATNVAHWTTPSLKCIRDPALVHQRPAPPS

SEQ ID NO: 376 - protein, 451 aa, Artificial Sequence
  Made in lab - Fc-ILR fusion protein construct
EPKSSDKTHTCPPCPAPELLGGPSVFLFPPKPKDTLMISRTPEVTCVVVDVSHEDPEVKFNWYVDGVEVHNAKTKPREEQYNSTYRVVSVLTVLHQDWLNGKEYKCKVSNKALPAPIEKTISKAKGQPREPQVYTLPPSREEMTKNQVSLTCLVKGFYPSDIAVEWESNGQPENNYKTTPPVLDSDGSFFLYSKLTVDKSRWQQGNVFSCSVMHEALHNHYTQKSLSLSPGKGSLSGRSANQGSNWVNVISDLKKIEDLIQSMHIDATLYTESDVHPSCKVTAMKCFLLELQVISLESGDASIHDTVENLIILANNSLSSNGNVTESGCKECEELEEKNIKEFLQSFVHIVQMFINTSGGSGGSGGSGGSGGSITCPPPMSVEHADIWVKSYSLYSRERYICNSGFKRKAGTSSLTECVLNKATNVAHWTTPSLKCIRDPALVHQRPAPPS

SEQ ID NO: 377 - protein, 451 aa, Artificial Sequence
  Made in lab - Fc-ILR fusion protein construct
EPKSSDKTHTCPPCPAPELLGGPSVFLFPPKPKDTLMISRTPEVTCVVVDVSHEDPEVKFNWYVDGVEVHNAKTKPREEQYNSTYRVVSVLTVLHQDWLNGKEYKCKVSNKALPAPIEKTISKAKGQPREPQVYTLPPSREEMTKNQVSLTCLVKGFYPSDIAVEWESNGQPENNYKTTPPVLDSDGSFFLYSKLTVDKSRWQQGNVFSCSVMHEALHNHYTQKSLSLSPGKGSLSGRSANRGSNWVNVISDLKKIEDLIQSMHIDATLYTESDVHPSCKVTAMKCFLLELQVISLESGDASIHDTVENLIILANNSLSSNGNVTESGCKECEELEEKNIKEFLQSFVHIVQMFINTSGGSGGSGGSGGSGGSITCPPPMSVEHADIWVKSYSLYSRERYICNSGFKRKAGTSSLTECVLNKATNVAHWTTPSLKCIRDPALVHQRPAPPS

SEQ ID NO: 378 - protein, 451 aa, Artificial Sequence
  Made in lab - Fc-ILR fusion protein construct
EPKSSDKTHTCPPCPAPELLGGPSVFLFPPKPKDTLMISRTPEVTCVVVDVSHEDPEVKFNWYVDGVEVHNAKTKPREEQYNSTYRVVSVLTVLHQDWLNGKEYKCKVSNKALPAPIEKTISKAKGQPREPQVYTLPPSREEMTKNQVSLTCLVKGFYPSDIAVEWESNGQPENNYKTTPPVLDSDGSFFLYSKLTVDKSRWQQGNVFSCSVMHEALHNHYTQKSLSLSPGKGSLSGRSANSGSNWVNVISDLKKIEDLIQSMHIDATLYTESDVHPSCKVTAMKCFLLELQVISLESGDASIHDTVENLIILANNSLSSNGNVTESGCKECEELEEKNIKEFLQSFVHIVQMFINTSGGSGGSGGSGGSGGSITCPPPMSVEHADIWVKSYSLYSRERYICNSGFKRKAGTSSLTECVLNKATNVAHWTTPSLKCIRDPALVHQRPAPPS

SEQ ID NO: 379 - protein, 451 aa, Artificial Sequence
  Made in lab - Fc-ILR fusion protein construct
EPKSSDKTHTCPPCPAPELLGGPSVFLFPPKPKDTLMISRTPEVTCVVVDVSHEDPEVKFNWYVDGVEVHNAKTKPREEQYNSTYRVVSVLTVLHQDWLNGKEYKCKVSNKALPAPIEKTISKAKGQPREPQVYTLPPSREEMTKNQVSLTCLVKGFYPSDIAVEWESNGQPENNYKTTPPVLDSDGSFFLYSKLTVDKSRWQQGNVFSCSVMHEALHNHYTQKSLSLSPGKGSLSGRSANTGSNWVNVISDLKKIEDLIQSMHIDATLYTESDVHPSCKVTAMKCFLLELQVISLESGDASIHDTVENLIILANNSLSSNGNVTESGCKECEELEEKNIKEFLQSFVHIVQMFINTSGGSGGSGGSGGSGGSITCPPPMSVEHADIWVKSYSLYSRERYICNSGFKRKAGTSSLTECVLNKATNVAHWTTPSLKCIRDPALVHQRPAPPS

SEQ ID NO: 380 - protein, 451 aa, Artificial Sequence
  Made in lab - Fc-ILR fusion protein construct
EPKSSDKTHTCPPCPAPELLGGPSVFLFPPKPKDTLMISRTPEVTCVVVDVSHEDPEVKFNWYVDGVEVHNAKTKPREEQYNSTYRVVSVLTVLHQDWLNGKEYKCKVSNKALPAPIEKTISKAKGQPREPQVYTLPPSREEMTKNQVSLTCLVKGFYPSDIAVEWESNGQPENNYKTTPPVLDSDGSFFLYSKLTVDKSRWQQGNVFSCSVMHEALHNHYTQKSLSLSPGKGSLSGRSANVGSNWVNVISDLKKIEDLIQSMHIDATLYTESDVHPSCKVTAMKCFLLELQVISLESGDASIHDTVENLIILANNSLSSNGNVTESGCKECEELEEKNIKEFLQSFVHIVQMFINTSGGSGGSGGSGGSGGSITCPPPMSVEHADIWVKSYSLYSRERYICNSGFKRKAGTSSLTECVLNKATNVAHWTTPSLKCIRDPALVHQRPAPPS

SEQ ID NO: 381 - protein, 451 aa, Artificial Sequence
  Made in lab - Fc-ILR fusion protein construct
EPKSSDKTHTCPPCPAPELLGGPSVFLFPPKPKDTLMISRTPEVTCVVVDVSHEDPEVKFNWYVDGVEVHNAKTKPREEQYNSTYRVVSVLTVLHQDWLNGKEYKCKVSNKALPAPIEKTISKAKGQPREPQVYTLPPSREEMTKNQVSLTCLVKGFYPSDIAVEWESNGQPENNYKTTPPVLDSDGSFFLYSKLTVDKSRWQQGNVFSCSVMHEALHNHYTQKSLSLSPGKGSLSGRSANWGSNWVNVISDLKKIEDLIQSMHIDATLYTESDVHPSCKVTAMKCFLLELQVISLESGDASIHDTVENLIILANNSLSSNGNVTESGCKECEELEEKNIKEFLQSFVHIVQMFINTSGGSGGSGGSGGSGGSITCPPPMSVEHADIWVKSYSLYSRERYICNSGFKRKAGTSSLTECVLNKATNVAHWTTPSLKCIRDPALVHQRPAPPS

SEQ ID NO: 382 - protein, 451 aa, Artificial Sequence
  Made in lab - Fc-ILR fusion protein construct
EPKSSDKTHTCPPCPAPELLGGPSVFLFPPKPKDTLMISRTPEVTCVVVDVSHEDPEVKFNWYVDGVEVHNAKTKPREEQYNSTYRVVSVLTVLHQDWLNGKEYKCKVSNKALPAPIEKTISKAKGQPREPQVYTLPPSREEMTKNQVSLTCLVKGFYPSDIAVEWESNGQPENNYKTTPPVLDSDGSFFLYSKLTVDKSRWQQGNVFSCSVMHEALHNHYTQKSLSLSPGKGSLSGRSANYGSNWVNVISDLKKIEDLIQSMHIDATLYTESDVHPSCKVTAMKCFLLELQVISLESGDASIHDTVENLIILANNSLSSNGNVTESGCKECEELEEKNIKEFLQSFVHIVQMFINTSGGSGGSGGSGGSGGSITCPPPMSVEHADIWVKSYSLYSRERYICNSGFKRKAGTSSLTECVLNKATNVAHWTTPSLKCIRDPALVHQRPAPPS

SEQ ID NO: 383 - protein, 453 aa, Artificial Sequence
  Made in lab - Fc-ILR fusion protein construct
EPKSSDKTHTCPPCPAPEAAGGPSVFLFPPKPKDTLYITREPEVTCVVVDVSHEDPEVKFNWYVDGVEVHNAKTKPREEQYNSTYRVVSVLTVLHQDWLNGKEYKCKVSNKALAAPIEKTISKAKGQPREPQVYTLPPSREEMTKNQVSLTCLVKGFYPSDIAVEWESNGQPENNYKTTPPVLDSDGSFFLYSKLTVDKSRWQQGNVFSCSVMHEALHNHYTQKSLSLSPGKGPLGLAGRSDNHSGNWVNVISDLKKIEDLIQSMHIDATLYTESDVHPSCKVTAMKCFLLELQVISLESGDASIHDTVENLIILANNSLSSNGNVTESGCKECEELEEKNIKEFLQSFVHIVQMFINTAGGSGGSGGSGGSGGSITCPPPMSVEHADIWVKSYSLYSRERYICNSGFKRKAGTSSLTECVLNKATNVAHWTTPSLKCIRDPALVHQRPAPPS

SEQ ID NO: 384 - protein, 452 aa, Artificial Sequence
  Made in lab - Fc-ILR fusion protein construct
EPKSSDKTHTCPPCPAPELLGGPSVFLFPPKPKDTLMISRTPEVTCVVVDVSHEDPEVKFNWYVDGVEVHNAKTKPREEQYNSTYRVVSVLTVLHQDWLNGKEYKCKVSNKALPAPIEKTISKAKGQPREPQVYTLPPSREEMTKNQVSLTCLVKGFYPSDIAVEWESNGQPENNYKTTPPVLDSDGSFFLYSKLTVDKSRWQQGNVFSCSVMHEALHNHYTQKSLSLSPGKPLGLAGSGRSDNRNWVNVISDLKKIEDLIQSMHIDATLYTESDVHPSCKVTAMKCFLLELQVISLESGDASIHDTVENLIILANNSLSSNGNVTESGCKECEELEEKNIKEFLQSFVHIVQMFINTAGGSGGSGGSGGSGGSITCPPPMSVEHADIWVKSYSLYSRERYICNSGFKRKAGTSSLTECVLNKATNVAHWTTPSLKCIRDPALVHQRPAPPS

SEQ ID NO: 385 - protein, 454 aa, Artificial Sequence
  Made in lab - Fc-ILR fusion protein construct
EPKSSDKTHTCPPCPAPELLGGPSVFLFPPKPKDTLMISRTPEVTCVVVDVSHEDPEVKFNWYVDGVEVHNAKTKPREEQYNSTYRVVSVLTVLHQDWLNGKEYKCKVSNKALPAPIEKTISKAKGQPREPQVYTLPPSREEMTKNQVSLTCLVKGFYPSDIAVEWESNGQPENNYKTTPPVLDSDGSFFLYSKLTVDKSRWQQGNVFSCSVMHEALHNHYTQKSLSLSPGKPLGLAGSGRSDNRGSNWVNVISDLKKIEDLIQSMHIDATLYTESDVHPSCKVTAMKCFLLELQVISLESGDASIHDTVENLIILANNSLSSNGNVTESGCKECEELEEKNIKEFLQSFVHIVQMFINTAGGSGGSGGSGGSGGSITCPPPMSVEHADIWVKSYSLYSRERYICNSGFKRKAGTSSLTECVLNKATNVAHWTTPSLKCIRDPALVHQRPAPPS

SEQ ID NO: 386 - protein, 453 aa, Artificial Sequence
  Made in lab - Fc-ILR fusion protein construct
EPKSSDKTHTCPPCPAPELLGGPSVFLFPPKPKDTLMISRTPEVTCVVVDVSHEDPEVKFNWYVDGVEVHNAKTKPREEQYNSTYRVVSVLTVLHQDWLNGKEYKCKVSNKALPAPIEKTISKAKGQPREPQVYTLPPSREEMTKNQVSLTCLVKGFYPSDIAVEWESNGQPENNYKTTPPVLDSDGSFFLYSKLTVDKSRWQQGNVFSCSVMHEALHNHYTQKSLSLSPGKGGGSKTHTGGGSNWVNVISDLKKIEDLIQSMHIDATLYTESDVHPSCKVTAMKCFLLELQVISLESGDASIHDTVENLIILANNSLSSNGNVTESGCKECEELEEKNIKEFLQSFVHIVQMFINTAGSPLGLAGSGRSDNRGSITCPPPMSVEHADIWVKSYSLYSRERYICNSGFKRKAGTSSLTECVLNKATNVAHWTTPSLKCIRDPALVHQRPAPPS

SEQ ID NO: 387 - protein, 452 aa, Artificial Sequence
  Made in lab - Fc-ILR fusion protein construct
EPKSSDKTHTCPPCPAPELLGGPSVFLFPPKPKDTLMISRTPEVTCVVVDVSHEDPEVKFNWYVDGVEVHNAKTKPREEQYNSTYRVVSVLTVLHQDWLNGKEYKCKVSNKALPAPIEKTISKAKGQPREPQVYTLPPSREEMTKNQVSLTCLVKGFYPSDIAVEWESNGQPENNYKTTPPVLDSDGSFFLYSKLTVDKSRWQQGNVFSCSVMHEALHNHYTQKSLSLSPGGGGSKTHTGGGSNWVNVISDLKKIEDLIQSMHIDATLYTESDVHPSCKVTAMKCFLLELQVISLESGDASIHDTVENLIILANNSLSSNGNVTESGCKECEELEEKNIKEFLQSFVHIVQMFINTAGSPLGLAGSGRSDNRGSITCPPPMSVEHADIWVKSYSLYSRERYICNSGFKRKAGTSSLTECVLNKATNVAHWTTPSLKCIRDPALVHQRPAPPS

SEQ ID NO: 388 - protein, 460 aa, Artificial Sequence
  Made in lab - Fc-ILR fusion protein construct
EPKSSDKTHTCPPCPAPELLGGPSVFLFPPKPKDTLMISRTPEVTCVVVDVSHEDPEVKFNWYVDGVEVHNAKTKPREEQYNSTYRVVSVLTVLHQDWLNGKEYKCKVSNKALPAPIEKTISKAKGQPREPQVYTLPPSREEMTKNQVSLTCLVKGFYPSDIAVEWESNGQPENNYKTTPPVLDSDGSFFLYSKLTVDKSRWQQGNVFSCSVMHEALHNHYTQKSLSLSPGKGGGSAPTSSGSLSGRSDNHGSNWVNVISDLKKIEDLIQSMHIDATLYTESDVHPSCKVTAMKCFLLELQVISLESGDASIHDTVENLIILANNSLSSNGNVTESGCKECEELEEKNIKEFLQSFVHIVQMFINTSGGSGGSGGSGGSGGSITCPPPMSVEHADIWVKSYSLYSRERYICNSGFKRKAGTSSLTECVLNKATNVAHWTTPSLKCIRDPALVHQRPAPPS

SEQ ID NO: 389 - protein, 451 aa, Artificial Sequence; identical to SEQ ID NO: 359
  Made in lab - Fc-ILR fusion protein construct

SEQ ID NO: 390 - protein, 450 aa, Artificial Sequence
  Made in lab - Fc-ILR fusion protein construct
EPKSSDKTHTCPPCPAPELLGGPSVFLFPPKPKDTLMISRTPEVTCVVVDVSHEDPEVKFNWYVDGVEVHNAKTKPREEQYNSTYRVVSVLTVLHQDWLNGKEYKCKVSNKALPAPIEKTISKAKGQPREPQVYTLPPSREEMTKNQVSLTCLVKGFYPSDIAVEWESNGQPENNYKTTPPVLDSDGSFFLYSKLTVDKSRWQQGNVFSCSVMHEALHNHYTQKSLSLSPGGSLSGRSDNHGSNWVNVISDLKKIEDLIQSMHIDATLYTESDVHPSCKVTAMKCFLLELQVISLESGDASIHDTVENLIILANNSLSSNGNVTESGCKECEELEEKNIKEFLQSFVHIVQMFINTSGGSGGSGGSGGSGGSITCPPPMSVEHADIWVKSYSLYSRERYICNSGFKRKAGTSSLTECVLNKATNVAHWTTPSLKCIRDPALVHQRPAPPS

SEQ ID NO: 391 - protein, 453 aa, Artificial Sequence
  Made in lab - Fc-ILR fusion protein construct
EPKSSDKTHTCPPCPAPELLGGPSVFLFPPKPKDTLMISRTPEVTCVVVDVSHEDPEVKFNWYVDGVEVHNAKTKPREEQYNSTYRVVSVLTVLHQDWLNGKEYKCKVSNKALPAPIEKTISKAKGQPREPQVYTLPPSREEMTKNQVSLTCLVKGFYPSDIAVEWESNGQPENNYKTTPPVLDSDGSFFLYSKLTVDKSRWQQGNVFSCSVMHEALHNHYTQKSLSLSPGPLGLAGSGRSDNRGANWVNVISNLKKIEDLIQSMHIDATLYTESDVHPSCKVTAMKCFLLELQVISLESGDASIHDTVENLIILANNSLSSNGNVTESGCKECEELEEKNIKEFLQSFVHIVQMFINTAGGSGGSGGSGGSGGSITCPPPMSVEHADIWVKSYSLYSRERYICNSGFKRKAGTSSLTECVLNKATNVAHWTTPSLKCIRDPALVHQRPAPPS

SEQ ID NO: 392 - protein, 453 aa, Artificial Sequence
  Made in lab - Fc-ILR fusion protein construct
EPKSSDKTHTCPPCPAPELLGGPSVFLFPPKPKDTLMISRTPEVTCVVVDVSHEDPEVKFNWYVDGVEVHNAKTKPREEQYNSTYRVVSVLTVLHQDWLNGKEYKCKVSNKALPAPIEKTISKAKGQPREPQVYTLPPSREEMTKNQVSLTCLVKGFYPSDIAVEWESNGQPENNYKTTPPVLDSDGSFFLYSKLTVDKSRWQQGNVFSCSVMHEALHNHYTQKSLSLSPGPLGLAGSGRSDNRGANWVNVISDLKKIEDLIQSMHIDATLYTESDVHPSCKVTAMKCFLLELQVISLESGDASIHDTVQNLIILANNSLSSNGNVTESGCKECEELEEKNIKEFLQSFVHIVQMFINTAGGSGGSGGSGGSGGSITCPPPMSVEHADIWVKSYSLYSRERYICNSGFKRKAGTSSLTECVLNKATNVAHWTTPSLKCIRDPALVHQRPAPPS

SEQ ID NO: 393 - protein, 453 aa, Artificial Sequence
  Made in lab - Fc-ILR fusion protein construct
EPKSSDKTHTCPPCPAPELLGGPSVFLFPPKPKDTLMISRTPEVTCVVVDVSHEDPEVKFNWYVDGVEVHNAKTKPREEQYNSTYRVVSVLTVLHQDWLNGKEYKCKVSNKALPAPIEKTISKAKGQPREPQVYTLPPSREEMTKNQVSLTCLVKGFYPSDIAVEWESNGQPENNYKTTPPVLDSDGSFFLYSKLTVDKSRWQQGNVFSCSVMHEALHNHYTQKSLSLSPGPLGLAGSGRSDNRGANWVNVISDLKKIEDLIQSMHIDATLYTESDVHPSCKVTAMKCFLLELQVISLESGDASIHDTVKNLIILANNSLSSNGNVTESGCKECEELEEKNIKEFLQSFVHIVQMFINTAGGSGGSGGSGGSGGSITCPPPMSVEHADIWVKSYSLYSRERYICNSGFKRKAGTSSLTECVLNKATNVAHWTTPSLKCIRDPALVHQRPAPPS

SEQ ID NO: 394 - protein, 453 aa, Artificial Sequence
  Made in lab - Fc-ILR fusion protein construct
EPKSSDKTHTCPPCPAPELLGGPSVFLFPPKPKDTLMISRTPEVTCVVVDVSHEDPEVKFNWYVDGVEVHNAKTKPREEQYNSTYRVVSVLTVLHQDWLNGKEYKCKVSNKALPAPIEKTISKAKGQPREPQVYTLPPSREEMTKNQVSLTCLVKGFYPSDIAVEWESNGQPENNYKTTPPVLDSDGSFFLYSKLTVDKSRWQQGNVFSCSVMHEALHNHYTQKSLSLSPGPLGLAGSGRSDNRGANWVNVISDLKKIEDLIQSMHIDATLYTESDVHPSCKVTAMKCFLLELQVISLESGDASIHDTVEALIILANNSLSSNGNVTESGCKECEELEEKNIKEFLQSFVHIVQMFINTAGGSGGSGGSGGSGGSITCPPPMSVEHADIWVKSYSLYSRERYICNSGFKRKAGTSSLTECVLNKATNVAHWTTPSLKCIRDPALVHQRPAPPS

SEQ ID NO: 395 - protein, 453 aa, Artificial Sequence
  Made in lab - Fc-ILR fusion protein construct
EPKSSDKTHTCPPCPAPELLGGPSVFLFPPKPKDTLMISRTPEVTCVVVDVSHEDPEVKFNWYVDGVEVHNAKTKPREEQYNSTYRVVSVLTVLHQDWLNGKEYKCKVSNKALPAPIEKTISKAKGQPREPQVYTLPPSREEMTKNQVSLTCLVKGFYPSDIAVEWESNGQPENNYKTTPPVLDSDGSFFLYSKLTVDKSRWQQGNVFSCSVMHEALHNHYTQKSLSLSPGPLGLAGSGRSDNRGANWVNVISDLKKIEDLIQSMHIDATLYTESDVHPSCKVTAMKCFLLELQVISLESGDASIHDTVEDLIILANNSLSSNGNVTESGCKECEELEEKNIKEFLQSFVHIVQMFINTAGGSGGSGGSGGSGGSITCPPPMSVEHADIWVKSYSLYSRERYICNSGFKRKAGTSSLTECVLNKATNVAHWTTPSLKCIRDPALVHQRPAPPS

SEQ ID NO: 396 - protein, 453 aa, Artificial Sequence
  Made in lab - Fc-ILR fusion protein construct
EPKSSDKTHTCPPCPAPELLGGPSVFLFPPKPKDTLMISRTPEVTCVVVDVSHEDPEVKFNWYVDGVEVHNAKTKPREEQYNSTYRVVSVLTVLHQDWLNGKEYKCKVSNKALPAPIEKTISKAKGQPREPQVYTLPPSREEMTKNQVSLTCLVKGFYPSDIAVEWESNGQPENNYKTTPPVLDSDGSFFLYSKLTVDKSRWQQGNVFSCSVMHEALHNHYTQKSLSLSPGPLGLAGSGRSDNRGANWVNVISDLKKIEDLIQSMHIDATLYTESDVHPSCKVTAMKCFLLELQVISLESGDASIHDTVENLIDLANNSLSSNGNVTESGCKECEELEEKNIKEFLQSFVHIVQMFINTAGGSGGSGGSGGSGGSITCPPPMSVEHADIWVKSYSLYSRERYICNSGFKRKAGTSSLTECVLNKATNVAHWTTPSLKCIRDPALVHQRPAPPS

SEQ ID NO: 397 - protein, 453 aa, Artificial Sequence
  Made in lab - Fc-ILR fusion protein construct
EPKSSDKTHTCPPCPAPELLGGPSVFLFPPKPKDTLMISRTPEVTCVVVDVSHEDPEVKFNWYVDGVEVHNAKTKPREEQYNSTYRVVSVLTVLHQDWLNGKEYKCKVSNKALPAPIEKTISKAKGQPREPQVYTLPPSREEMTKNQVSLTCLVKGFYPSDIAVEWESNGQPENNYKTTPPVLDSDGSFFLYSKLTVDKSRWQQGNVFSCSVMHEALHNHYTQKSLSLSPGPLGLAGSGRSDNQGANWVNVISDLKKIEDLIQSMHIDATLYTESDVHPSCKVTAMKCFLLELQVISLESGDASIHDTVENLIILANNSLSSNGNVTESGCKECEELEEKNIKEFLQSFVHIVQMFINTAGGSGGSGGSGGSGGSITCPPPMSVEHADIWVKSYSLYSRERYICNSGFKRKAGTSSLTECVLNKATNVAHWTTPSLKCIRDPALVHQRPAPPS

SEQ ID NO: 398 - protein, 453 aa, Artificial Sequence
  Made in lab - Fc-ILR fusion protein construct
EPKSSDKTHTCPPCPAPELLGGPSVFLFPPKPKDTLMISRTPEVTCVVVDVSHEDPEVKFNWYVDGVEVHNAKTKPREEQYNSTYRVVSVLTVLHQDWLNGKEYKCKVSNKALPAPIEKTISKAKGQPREPQVYTLPPSREEMTKNQVSLTCLVKGFYPSDIAVEWESNGQPENNYKTTPPVLDSDGSFFLYSKLTVDKSRWQQGNVFSCSVMHEALHNHYTQKSLSLSPGPLGLAGSGRSDNYGANWVNVISDLKKIEDLIQSMHIDATLYTESDVHPSCKVTAMKCFLLELQVISLESGDASIHDTVENLIILANNSLSSNGNVTESGCKECEELEEKNIKEFLQSFVHIVQMFINTAGGSGGSGGSGGSGGSITCPPPMSVEHADIWVKSYSLYSRERYICNSGFKRKAGTSSLTECVLNKATNVAHWTTPSLKCIRDPALVHQRPAPPS

SEQ ID NO: 399 - protein, 453 aa, Artificial Sequence; identical to SEQ ID NO: 398
  Made in lab - Fc-ILR fusion protein construct

SEQ ID NO: 400 - DNA, 1359 bp, Artificial Sequence
  Made in lab - Polynucleotide encoding Fc-ILR fusion protein construct
gagcccaaatcttctgacaaaactcacacatgcccaccgtgcccagcacctgaactcctggggggaccgtcagtcttcctcttccccccaaaacccaaggacaccctcatgatctcccggacccctgaggtcacatgcgtggtggtggacgtgagccacgaagaccctgaggtcaagttcaactggtacgtggacggcgtggaggtgcataatgccaagacaaagccgcgggaggagcagtacaacagcacgtaccgtgtggtcagcgtcctcaccgtcctgcaccaggactggctgaatggcaaggagtacaagtgcaaggtctccaacaaagccctcccagcccccatcgagaaaaccatctccaaagccaaagggcagccccgagaaccacaggtgtacaccctgcccccatcacgggaggagatgaccaagaaccaggtcagcctgacctgcctggtcaaaggcttctatcccagcgacatcgccgtggagtgggagagcaatgggcagccggagaacaactacaagaccacgcctcccgtgctggactccgacggctccttcttcctctatagcaagctcaccgtggacaagagcaggtggcagcaggggaacgtcttctcatgctccgtgatgcatgaggctctgcacaaccactacacgcagaagagcctctccctgtccccgggtccattgggactggctgggagcggtagatccgacaattacggagccaactgggtgaacgtgatctcggacctgaagaagatcgaggacctcatccagtcgatgcacatcgacgcgacgctgtacacggagtcggacgtccacccgtcgtgcaaggtcacggcgatgaagtgcttcctcctggagctccaagtcatctcgctcgagtcgggggacgcgtcgatccacgacacggtggagaacctgatcatcctggcgaacaactcgctgtcgtcgaacgggaacgtcacggagtcgggctgcaaggagtgcgaggagctggaggagaagaacatcaaggagttcctgcagtcgttcgtgcacatcgtccagatgttcatcaacacggccggtggctccggcggaagcggaggttccggcggtagcggtggatccatcacgtgcccgccccccatgtccgtggagcacgcagacatctgggtcaagagctacagcttgtactcccgggagcggtacatctgcaactcgggtttcaagcggaaggccggcacgtccagcctgacggagtgcgtgttgaacaaggccacgaatgtcgcccactggacgaccccctcgctcaagtgcatccgcgacccggccctggttcaccagcggcccgcgccaccctcc

SEQ ID NO: 401 - protein, 453 aa, Artificial Sequence; identical to SEQ ID NO: 398
  Made in lab - Fc-ILR fusion protein construct

SEQ ID NO: 402 - DNA, 1359 bp, Artificial Sequence
  Made in lab - Polynucleotide encoding Fc-ILR fusion protein construct
gagcccaaatcttctgacaaaactcacacatgcccaccgtgcccagcacctgaactcctggggggaccgtcagtcttcctcttccccccaaaacccaaggacaccctcatgatctcccggacccctgaggtcacatgcgtggtggtggacgtgagccacgaagaccctgaggtcaagttcaactggtacgtggacggcgtggaggtgcataatgccaagacaaagccgcgggaggagcagtacaacagcacgtaccgtgtggtcagcgtcctcaccgtcctgcaccaggactggctgaatggcaaggagtacaagtgcaaggtctccaacaaagccctcccagcccccatcgagaaaaccatctccaaagccaaagggcagccccgagaaccacaggtgtacaccctgcccccatcacgggaggagatgaccaagaaccaggtcagcctgacctgcctggtcaaaggcttctatcccagcgacatcgccgtggagtgggagagcaatgggcagccggagaacaactacaagaccacgcctcccgtgctggactccgacggctccttcttcctctatagcaagctcaccgtggacaagagcaggtggcagcaggggaacgtcttctcatgctccgtgatgcatgaggctctgcacaaccactacacgcagaagagcctctccctgtccccgggtccattgggactggctgggagcggtagatccgacaattacggagccaattgggtgaacgtgatcagcgacctgaagaagatcgaggacctcatccagagcatgcacatcgacgccaccctgtacaccgagagcgatgtgcaccccagctgtaaggtgaccgccatgaagtgctttctgctggagctgcaagtgatcagcctggagagcggcgacgccagcatccacgacaccgtggagaacctgatcatcctggccaacaacagcctgagcagcaacggcaatgtgaccgagagcggctgtaaggagtgtgaggagctggaggagaagaacatcaaggagtttctgcagagcttcgtgcacatcgtgcagatgttcatcaacaccgccggtggctccggcggaagcggaggttccggcggtagcggtggatccatcacgtgcccgccccccatgtccgtggagcacgcagacatctgggtcaagagctacagcttgtactcccgggagcggtacatctgcaactcgggtttcaagcggaaggccggcacgtccagcctgacggagtgcgtgttgaacaaggccacgaatgtcgcccactggacgaccccctcgctcaagtgcatccgcgacccggccctggttcaccagcggcccgcgccaccctcc

SEQ ID NO: 403 - protein, 453 aa, Artificial Sequence; identical to SEQ ID NO: 398
  Made in lab - Fc-ILR fusion protein construct

SEQ ID NO: 404 - DNA, 1359 bp, Artificial Sequence
  Made in lab - Polynucleotide encoding Fc-ILR fusion protein construct
gagcccaaatcttctgacaaaactcacacatgcccaccgtgcccagcacctgaactcctggggggaccgtcagtcttcctcttccccccaaaacccaaggacaccctcatgatctcccggacccctgaggtcacatgcgtggtggtggacgtgagccacgaagaccctgaggtcaagttcaactggtacgtggacggcgtggaggtgcataatgccaagacaaagccgcgggaggagcagtacaacagcacgtaccgtgtggtcagcgtcctcaccgtcctgcaccaggactggctgaatggcaaggagtacaagtgcaaggtctccaacaaagccctcccagcccccatcgagaaaaccatctccaaagccaaagggcagccccgagaaccacaggtgtacaccctgcccccatcacgggaggagatgaccaagaaccaggtcagcctgacctgcctggtcaaaggcttctatcccagcgacatcgccgtggagtgggagagcaatgggcagccggagaacaactacaagaccacgcctcccgtgctggactccgacggctccttcttcctctatagcaagctcaccgtggacaagagcaggtggcagcaggggaacgtcttctcatgctccgtgatgcatgaggctctgcacaaccactacacgcagaagagcctctccctgtccccgggtccattgggactggctgggagcggtagatccgacaattacggagccaactgggtgaacgtgatcagcgacctgaagaagatcgaggacctgatccagagcatgcacatcgacgccaccctgtacaccgagagcgacgtgcaccccagctgcaaggtgaccgccatgaagtgcttcctgctggagctgcaggtgatcagcctggagagcggcgacgccagcatccacgacaccgtggagaacctgatcatcctggccaacaacagcctgagcagcaacggcaacgtgaccgagagcggctgcaaggagtgcgaggagctggaggagaagaacatcaaggagttcctgcagagcttcgtgcacatcgtgcagatgttcatcaacaccgccggtggctccggcggaagcggaggttccggcggtagcggtggatccatcacctgccctcctccaatgagcgtggagcacgccgacatctgggtgaagagctacagcctgtacagccgggagcggtacatctgcaacagcggcttcaagcggaaggctggcaccagcagcctgaccgagtgcgtgctgaacaaggccaccaacgtggcccactggaccacccccagcctgaagtgcatccgggaccctgccctggtgcatcaacggcctgctcctcctagc

SEQ ID NO: 405 - protein, 440 aa, Artificial Sequence
  Made in lab - Fc-ILR fusion protein construct
EPKSSDKTHTCPPCPAPELLGGPSVFLFPPKPKDTLMISRTPEVTCVVVDVSHEDPEVKFNWYVDGVEVHNAKTKPREEQYNSTYRVVSVLTVLHQDWLNGKEYKCKVSNKALPAPIEKTISKAKGQPREPQVYTLPPSREEMTKNQVSLTCLVKGFYPSDIAVEWESNGQPENNYKTTPPVLDSDGSFFLYSKLTVDKSRWQQGNVFSCSVMHEALHNHYTQKSLSLSPGPLGLAGSGRSDNYGANWVNVISDLKKIEDLIQSMHIDATLYTESDVHPSCKVTAMKCFLLELQVISLESGDASIHDTVENLIILANNSLSSNGNVTESGCKECEELEEKNIKEFLQSFVHIVQMFINTAGGSGGSGGSGGSGGSIACPPPMSVEHADIWVKSYSLYSRERYICNSGFKRKAGTSSLTECVLNKATNVAHWTTPSLKCIR

SEQ ID NO: 406 - protein, 440 aa, Artificial Sequence
  Made in lab - Fc-ILR fusion protein construct
EPKSSDKTHTCPPCPAPELLGGPSVFLFPPKPKDTLMISRTPEVTCVVVDVSHEDPEVKFNWYVDGVEVHNAKTKPREEQYNSTYRVVSVLTVLHQDWLNGKEYKCKVSNKALPAPIEKTISKAKGQPREPQVYTLPPSREEMTKNQVSLTCLVKGFYPSDIAVEWESNGQPENNYKTTPPVLDSDGSFFLYSKLTVDKSRWQQGNVFSCSVMHEALHNHYTQKSLSLSPGPLGLAGSGRSDNYGANWVNVISDLKKIEDLIQSMHIDATLYTESDVHPSCKVTAMKCFLLELQVISCESGDASIHDTVENLIILANNSLSSNGNVTESGCKECEELEEKNIKEFLQSFVHIVQMFINTAGGSGGSGGSGGSGGSIACPPPMSVEHADIWVKSYSLYSRERYICNSGFKRKAGTCSLTECVLNKATNVAHWTTPSLKCIR

SEQ ID NO: 407 - protein, 440 aa, Artificial Sequence
  Made in lab - Fc-ILR fusion protein construct
EPKSSDKTHTCPPCPAPELLGGPSVFLFPPKPKDTLMISRTPEVTCVVVDVSHEDPEVKFNWYVDGVEVHNAKTKPREEQYNSTYRVVSVLTVLHQDWLNGKEYKCKVSNKALPAPIEKTISKAKGQPREPQVYTLPPSREEMTKNQVSLTCLVKGFYPSDIAVEWESNGQPENNYKTTPPVLDSDGSFFLYSKLTVDKSRWQQGNVFSCSVMHEALHNHYTQKSLSLSPGGGNWVNVISDLKKIEDLIQSMHIDATLYTESDVHPSCKVTAMKCFLLELQVISLESGDASIHDTVENLIILANNSLSSNGNVTESGCKECEELEEKNIKEFLQSFVHIVQMFINTAGPLGLAGSGRSDNQGIACPPPMSVEHADIWVKSYSLYSRERYICNSGFKRKAGTSSLTECVLNKATNVAHWTTPSLKCIRDPALVHQRPAPPS

SEQ ID NO: 408 - protein, 442 aa, Artificial Sequence
  Made in lab - Fc-ILR fusion protein construct
EPKSSDKTHTCPPCPAPELLGGPSVFLFPPKPKDTLMISRTPEVTCVVVDVSHEDPEVKFNWYVDGVEVHNAKTKPREEQYNSTYRVVSVLTVLHQDWLNGKEYKCKVSNKALPAPIEKTISKAKGQPREPQVYTLPPSREEMTKNQVSLTCLVKGFYPSDIAVEWESNGQPENNYKTTPPVLDSDGSFFLYSKLTVDKSRWQQGNVFSCSVMHEALHNHYTQKSLSLSPGGGNWVNVISDLKKIEDLIQSMHIDATLYTESDVHPSCKVTAMKCFLLELQVISLESGDASIHDTVENLIILANNSLSSNGNVTESGCKECEELEEKNIKEFLQSFVHIVQMFINTAGSPLGLAGSGRSDNQGAIACPPPMSVEHADIWVKSYSLYSRERYICNSGFKRKAGTSSLTECVLNKATNVAHWTTPSLKCIRDPALVHQRPAPPS

SEQ ID NO: 409 - protein, 444 aa, Artificial Sequence
  Made in lab - Fc-ILR fusion protein construct
EPKSSDKTHTCPPCPAPELLGGPSVFLFPPKPKDTLMISRTPEVTCVVVDVSHEDPEVKFNWYVDGVEVHNAKTKPREEQYNSTYRVVSVLTVLHQDWLNGKEYKCKVSNKALPAPIEKTISKAKGQPREPQVYTLPPSREEMTKNQVSLTCLVKGFYPSDIAVEWESNGQPENNYKTTPPVLDSDGSFFLYSKLTVDKSRWQQGNVFSCSVMHEALHNHYTQKSLSLSPGGGNWVNVISDLKKIEDLIQSMHIDATLYTESDVHPSCKVTAMKCFLLELQVISLESGDASIHDTVENLIILANNSLSSNGNVTESGCKECEELEEKNIKEFLQSFVHIVQMFINTAGGSPLGLAGSGRSDNQGGAIACPPPMSVEHADIWVKSYSLYSRERYICNSGFKRKAGTSSLTECVLNKATNVAHWTTPSLKCIRDPALVHQRPAPPS

SEQ ID NO: 410 - protein, 446 aa, Artificial Sequence
  Made in lab - Fc-ILR fusion protein construct
EPKSSDKTHTCPPCPAPELLGGPSVFLFPPKPKDTLMISRTPEVTCVVVDVSHEDPEVKFNWYVDGVEVHNAKTKPREEQYNSTYRVVSVLTVLHQDWLNGKEYKCKVSNKALPAPIEKTISKAKGQPREPQVYTLPPSREEMTKNQVSLTCLVKGFYPSDIAVEWESNGQPENNYKTTPPVLDSDGSFFLYSKLTVDKSRWQQGNVFSCSVMHEALHNHYTQKSLSLSPGGGNWVNVISDLKKIEDLIQSMHIDATLYTESDVHPSCKVTAMKCFLLELQVISLESGDASIHDTVENLIILANNSLSSNGNVTESGCKECEELEEKNIKEFLQSFVHIVQMFINTAGGGSPLGLAGSGRSDNQGGGAIACPPPMSVEHADIWVKSYSLYSRERYICNSGFKRKAGTSSLTECVLNKATNVAHWTTPSLKCIRDPALVHQRPAPPS

SEQ ID NO: 411 - protein, 448 aa, Artificial Sequence
  Made in lab - Fc-ILR fusion protein construct
EPKSSDKTHTCPPCPAPELLGGPSVFLFPPKPKDTLMISRTPEVTCVVVDVSHEDPEVKFNWYVDGVEVHNAKTKPREEQYNSTYRVVSVLTVLHQDWLNGKEYKCKVSNKALPAPIEKTISKAKGQPREPQVYTLPPSREEMTKNQVSLTCLVKGFYPSDIAVEWESNGQPENNYKTTPPVLDSDGSFFLYSKLTVDKSRWQQGNVFSCSVMHEALHNHYTQKSLSLSPGGGNWVNVISDLKKIEDLIQSMHIDATLYTESDVHPSCKVTAMKCFLLELQVISLESGDASIHDTVENLIILANNSLSSNGNVTESGCKECEELEEKNIKEFLQSFVHIVQMFINTAGGSGSPLGLAGSGRSDNQGGGGAIACPPPMSVEHADIWVKSYSLYSRERYICNSGFKRKAGTSSLTECVLNKATNVAHWTTPSLKCIRDPALVHQRPAPPS

SEQ ID NO: 412 - protein, 450 aa, Artificial Sequence
  Made in lab - Fc-ILR fusion protein construct
EPKSSDKTHTCPPCPAPELLGGPSVFLFPPKPKDTLMISRTPEVTCVVVDVSHEDPEVKFNWYVDGVEVHNAKTKPREEQYNSTYRVVSVLTVLHQDWLNGKEYKCKVSNKALPAPIEKTISKAKGQPREPQVYTLPPSREEMTKNQVSLTCLVKGFYPSDIAVEWESNGQPENNYKTTPPVLDSDGSFFLYSKLTVDKSRWQQGNVFSCSVMHEALHNHYTQKSLSLSPGGGNWVNVISDLKKIEDLIQSMHIDATLYTESDVHPSCKVTAMKCFLLELQVISLESGDASIHDTVENLIILANNSLSSNGNVTESGCKECEELEEKNIKEFLQSFVHIVQMFINTAGGSGGSPLGLAGSGRSDNQGGSGGAIACPPPMSVEHADIWVKSYSLYSRERYICNSGFKRKAGTSSLTECVLNKATNVAHWTTPSLKCIRDPALVHQRPAPPS

SEQ ID NO: 413 - protein, 440 aa, Artificial Sequence
  Made in lab - Fc-ILR fusion protein construct
EPKSSDKTHTCPPCPAPELLGGPSVFLFPPKPKDTLMISRTPEVTCVVVDVSHEDPEVKFNWYVDGVEVHNAKTKPREEQYNSTYRVVSVLTVLHQDWLNGKEYKCKVSNKALPAPIEKTISKAKGQPREPQVYTLPPSREEMTKNQVSLTCLVKGFYPSDIAVEWESNGQPENNYKTTPPVLDSDGSFFLYSKLTVDKSRWQQGNVFSCSVMHEALHNHYTQKSLSLSPGGGNWVNVISDLKKIEDLIQSMHIDATLYTESDVHPSCKVTAMKCFLLELQVISLESGDASIHDTVENLIILANNSLSSNGNVTESGCKECEELEEKNIKEFLQSFVHIVQMFINTAGPLGLAGSGRSDNRGIACPPPMSVEHADIWVKSYSLYSRERYICNSGFKRKAGTSSLTECVLNKATNVAHWTTPSLKCIRDPALVHQRPAPPS

SEQ ID NO: 414 - protein, 442 aa, Artificial Sequence
  Made in lab - Fc-ILR fusion protein construct
EPKSSDKTHTCPPCPAPELLGGPSVFLFPPKPKDTLMISRTPEVTCVVVDVSHEDPEVKFNWYVDGVEVHNAKTKPREEQYNSTYRVVSVLTVLHQDWLNGKEYKCKVSNKALPAPIEKTISKAKGQPREPQVYTLPPSREEMTKNQVSLTCLVKGFYPSDIAVEWESNGQPENNYKTTPPVLDSDGSFFLYSKLTVDKSRWQQGNVFSCSVMHEALHNHYTQKSLSLSPGGGNWVNVISDLKKIEDLIQSMHIDATLYTESDVHPSCKVTAMKCFLLELQVISLESGDASIHDTVENLIILANNSLSSNGNVTESGCKECEELEEKNIKEFLQSFVHIVQMFINTAGSPLGLAGSGRSDNRGAIACPPPMSVEHADIWVKSYSLYSRERYICNSGFKRKAGTSSLTECVLNKATNVAHWTTPSLKCIRDPALVHQRPAPPS

SEQ ID NO: 415 - protein, 444 aa, Artificial Sequence
  Made in lab - Fc-ILR fusion protein construct
EPKSSDKTHTCPPCPAPELLGGPSVFLFPPKPKDTLMISRTPEVTCVVVDVSHEDPEVKFNWYVDGVEVHNAKTKPREEQYNSTYRVVSVLTVLHQDWLNGKEYKCKVSNKALPAPIEKTISKAKGQPREPQVYTLPPSREEMTKNQVSLTCLVKGFYPSDIAVEWESNGQPENNYKTTPPVLDSDGSFFLYSKLTVDKSRWQQGNVFSCSVMHEALHNHYTQKSLSLSPGGGNWVNVISDLKKIEDLIQSMHIDATLYTESDVHPSCKVTAMKCFLLELQVISLESGDASIHDTVENLIILANNSLSSNGNVTESGCKECEELEEKNIKEFLQSFVHIVQMFINTAGGSPLGLAGSGRSDNRGGAIACPPPMSVEHADIWVKSYSLYSRERYICNSGFKRKAGTSSLTECVLNKATNVAHWTTPSLKCIRDPALVHQRPAPPS

SEQ ID NO: 416 - protein, 446 aa, Artificial Sequence
  Made in lab - Fc-ILR fusion protein construct
EPKSSDKTHTCPPCPAPELLGGPSVFLFPPKPKDTLMISRTPEVTCVVVDVSHEDPEVKFNWYVDGVEVHNAKTKPREEQYNSTYRVVSVLTVLHQDWLNGKEYKCKVSNKALPAPIEKTISKAKGQPREPQVYTLPPSREEMTKNQVSLTCLVKGFYPSDIAVEWESNGQPENNYKTTPPVLDSDGSFFLYSKLTVDKSRWQQGNVFSCSVMHEALHNHYTQKSLSLSPGGGNWVNVISDLKKIEDLIQSMHIDATLYTESDVHPSCKVTAMKCFLLELQVISLESGDASIHDTVENLIILANNSLSSNGNVTESGCKECEELEEKNIKEFLQSFVHIVQMFINTAGGGSPLGLAGSGRSDNRGGGAIACPPPMSVEHADIWVKSYSLYSRERYICNSGFKRKAGTSSLTECVLNKATNVAHWTTPSLKCIRDPALVHQRPAPPS

SEQ ID NO: 417 - protein, 448 aa, Artificial Sequence
  Made in lab - Fc-ILR fusion protein construct
EPKSSDKTHTCPPCPAPELLGGPSVFLFPPKPKDTLMISRTPEVTCVVVDVSHEDPEVKFNWYVDGVEVHNAKTKPREEQYNSTYRVVSVLTVLHQDWLNGKEYKCKVSNKALPAPIEKTISKAKGQPREPQVYTLPPSREEMTKNQVSLTCLVKGFYPSDIAVEWESNGQPENNYKTTPPVLDSDGSFFLYSKLTVDKSRWQQGNVFSCSVMHEALHNHYTQKSLSLSPGGGNWVNVISDLKKIEDLIQSMHIDATLYTESDVHPSCKVTAMKCFLLELQVISLESGDASIHDTVENLIILANNSLSSNGNVTESGCKECEELEEKNIKEFLQSFVHIVQMFINTAGGSGSPLGLAGSGRSDNRGGGGAIACPPPMSVEHADIWVKSYSLYSRERYICNSGFKRKAGTSSLTECVLNKATNVAHWTTPSLKCIRDPALVHQRPAPPS

SEQ ID NO: 418 - protein, 450 aa, Artificial Sequence
  Made in lab - Fc-ILR fusion protein construct
EPKSSDKTHTCPPCPAPELLGGPSVFLFPPKPKDTLMISRTPEVTCVVVDVSHEDPEVKFNWYVDGVEVHNAKTKPREEQYNSTYRVVSVLTVLHQDWLNGKEYKCKVSNKALPAPIEKTISKAKGQPREPQVYTLPPSREEMTKNQVSLTCLVKGFYPSDIAVEWESNGQPENNYKTTPPVLDSDGSFFLYSKLTVDKSRWQQGNVFSCSVMHEALHNHYTQKSLSLSPGGGNWVNVISDLKKIEDLIQSMHIDATLYTESDVHPSCKVTAMKCFLLELQVISLESGDASIHDTVENLIILANNSLSSNGNVTESGCKECEELEEKNIKEFLQSFVHIVQMFINTAGGSGGSPLGLAGSGRSDNRGGSGGAIACPPPMSVEHADIWVKSYSLYSRERYICNSGFKRKAGTSSLTECVLNKATNVAHWTTPSLKCIRDPALVHQRPAPPS

SEQ ID NO: 419 - protein, 451 aa, Artificial Sequence
  Made in lab - Fc-ILR fusion protein construct
EPKSSDKTHTCPPCPAPELLGGPSVFLFPPKPKDTLMISRTPEVTCVVVDVSHEDPEVKFNWYVDGVEVHNAKTKPREEQYNSTYRVVSVLTVLHQDWLNGKEYKCKVSNKALPAPIEKTISKAKGQPREPQVYTLPPSREEMTKNQVSLTCLVKGFYPSDIAVEWESNGQPENNYKTTPPVLDSDGSFFLYSKLTVDKSRWQQGNVFSCSVMHEALHNHYTQKSLSLSPGKGNWVNVISDLKKIEDLIQSMHIDATLYTESDVHPSCKVTAMKCFLLELQVISLESGDASIHDTVENLIILANNSLSSNGNVTESGCKECEELEEKNIKEFLQSFVHIVQMFINTAGGSGGSEPKENLYFQGGGSGGSGGGSITCPPPMSVEHADIWVKSYSLYSRERYICNSGFKRKAGTSSLTECVLNKCTNVAHWTCPSLKCIRDPALVHQRPAPPS

SEQ ID NO: 420 - protein, 456 aa, Artificial Sequence
  Made in lab - Fc-ILR fusion protein construct
EPKSSDKTHTCPPCPAPELLGGPSVFLFPPKPKDTLMISRTPEVTCVVVDVSHEDPEVKFNWYVDGVEVHNAKTKPREEQYNSTYRVVSVLTVLHQDWLNGKEYKCKVSNKALPAPIEKTISKAKGQPREPQVYTLPPSREEMTKNQVSLTCLVKGFYPSDIAVEWESNGQPENNYKTTPPVLDSDGSFFLYSKLTVDKSRWQQGNVFSCSVMHEALHNHYTQKSLSLSPGKGGSGGSNWVNVISDLKKIEDLIQSMHIDATLYTESDVHPSCKVTAMKCFLLELQVISLESGDASIHDTVENLIILANNSLSSNGNVTESGCKECEELEEKNIKEFLQSFVHIVQMFINTAGGSGGSEPKENLYFQGGGSGGSGGGSITCPPPMSVEHADIWVKSYSLYSRERYICNSGFKRKAGTSSLTECVLNKCTNVAHWTCPSLKCIRDPALVHQRPAPPS

SEQ ID NO: 421 - protein, 462 aa, Artificial Sequence
  Made in lab - Fc-ILR fusion protein construct
EPKSSDKTHTCPPCPAPELLGGPSVFLFPPKPKDTLMISRTPEVTCVVVDVSHEDPEVKFNWYVDGVEVHNAKTKPREEQYNSTYRVVSVLTVLHQDWLNGKEYKCKVSNKALPAPIEKTISKAKGQPREPQVYTLPPSREEMTKNQVSLTCLVKGFYPSDIAVEWESNGQPENNYKTTPPVLDSDGSFFLYSKLTVDKSRWQQGNVFSCSVMHEALHNHYTQKSLSLSPGKGGSGGSGGSGGSNWVNVISDLKKIEDLIQSMHIDATLYTESDVHPSCKVTAMKCFLLELQVISLESGDASIHDTVENLIILANNSLSSNGNVTESGCKECEELEEKNIKEFLQSFVHIVQMFINTAGGSGGSEPKENLYFQGGGSGGSGGGSITCPPPMSVEHADIWVKSYSLYSRERYICNSGFKRKAGTSSLTECVLNKCTNVAHWTCPSLKCIRDPALVHQRPAPPS

SEQ ID NO: 422 - protein, 450 aa, Artificial Sequence
  Made in lab - Fc-ILR fusion protein construct
EPKSSDKTHTCPPCPAPELLGGPSVFLFPPKPKDTLMISRTPEVTCVVVDVSHEDPEVKFNWYVDGVEVHNAKTKPREEQYNSTYRVVSVLTVLHQDWLNGKEYKCKVSNKALPAPIEKTISKAKGQPREPQVYTLPPSREEMTKNQVSLTCLVKGFYPSDIAVEWESNGQPENNYKTTPPVLDSDGSFFLYSKLTVDKSRWQQGNVFSCSVMHEALHNHYTQKSLSLSPGPLGLAGSGRSDNQGANWVNVISDLKKIEDLIQSMHIDATLYTESDVHPSCKVTAMKCFLLELQVISLESGDASIHDTVENLIILANNSLSSNGNVTESGCKECEELEEKNIKEFLQSFVHIVQMFINTAGGSGGSGGSGGSITCPPPMSVEHADIWVKSYSLYSRERYICNSGFKRKAGTSSLTECVLNKATNVAHWTTPSLKCIRDPALVHQRPAPPS

SEQ ID NO: 423 - protein, 447 aa, Artificial Sequence
  Made in lab - Fc-ILR fusion protein construct
EPKSSDKTHTCPPCPAPELLGGPSVFLFPPKPKDTLMISRTPEVTCVVVDVSHEDPEVKFNWYVDGVEVHNAKTKPREEQYNSTYRVVSVLTVLHQDWLNGKEYKCKVSNKALPAPIEKTISKAKGQPREPQVYTLPPSREEMTKNQVSLTCLVKGFYPSDIAVEWESNGQPENNYKTTPPVLDSDGSFFLYSKLTVDKSRWQQGNVFSCSVMHEALHNHYTQKSLSLSPGPLGLAGSGRSDNQGANWVNVISDLKKIEDLIQSMHIDATLYTESDVHPSCKVTAMKCFLLELQVISLESGDASIHDTVENLIILANNSLSSNGNVTESGCKECEELEEKNIKEFLQSFVHIVQMFINTAGGSGGSGGSITCPPPMSVEHADIWVKSYSLYSRERYICNSGFKRKAGTSSLTECVLNKATNVAHWTTPSLKCIRDPALVHQRPAPPS

SEQ ID NO: 424 - protein, 444 aa, Artificial Sequence
  Made in lab - Fc-ILR fusion protein construct
EPKSSDKTHTCPPCPAPELLGGPSVFLFPPKPKDTLMISRTPEVTCVVVDVSHEDPEVKFNWYVDGVEVHNAKTKPREEQYNSTYRVVSVLTVLHQDWLNGKEYKCKVSNKALPAPIEKTISKAKGQPREPQVYTLPPSREEMTKNQVSLTCLVKGFYPSDIAVEWESNGQPENNYKTTPPVLDSDGSFFLYSKLTVDKSRWQQGNVFSCSVMHEALHNHYTQKSLSLSPGPLGLAGSGRSDNQGANWVNVISDLKKIEDLIQSMHIDATLYTESDVHPSCKVTAMKCFLLELQVISLESGDASIHDTVENLIILANNSLSSNGNVTESGCKECEELEEKNIKEFLQSFVHIVQMFINTAGGSGGSITCPPPMSVEHADIWVKSYSLYSRERYICNSGFKRKAGTSSLTECVLNKATNVAHWTTPSLKCIRDPALVHQRPAPPS

SEQ ID NO: 425 - protein, 441 aa, Artificial Sequence
  Made in lab - Fc-ILR fusion protein construct
EPKSSDKTHTCPPCPAPELLGGPSVFLFPPKPKDTLMISRTPEVTCVVVDVSHEDPEVKFNWYVDGVEVHNAKTKPREEQYNSTYRVVSVLTVLHQDWLNGKEYKCKVSNKALPAPIEKTISKAKGQPREPQVYTLPPSREEMTKNQVSLTCLVKGFYPSDIAVEWESNGQPENNYKTTPPVLDSDGSFFLYSKLTVDKSRWQQGNVFSCSVMHEALHNHYTQKSLSLSPGPLGLAGSGRSDNQGANWVNVISDLKKIEDLIQSMHIDATLYTESDVHPSCKVTAMKCFLLELQVISLESGDASIHDTVENLIILANNSLSSNGNVTESGCKECEELEEKNIKEFLQSFVHIVQMFINTAGGSITCPPPMSVEHADIWVKSYSLYSRERYICNSGFKRKAGTSSLTECVLNKATNVAHWTTPSLKCIRDPALVHQRPAPPS

SEQ ID NO: 426 - protein, 454 aa, Artificial Sequence
  Made in lab - Fc-ILR fusion protein construct
EPKSSDKTHTCPPCPAPELLGGPSVFLFPPKPKDTLMISRTPEVTCVVVDVSHEDPEVKFNWYVDGVEVHNAKTKPREEQYNSTYRVVSVLTVLHQDWLNGKEYKCKVSNKALPAPIEKTISKAKGQPREPQVYTLPPSREEMTKNQVSLTCLVKGFYPSDIAVEWESNGQPENNYKTTPPVLDSDGSFFLYSKLTVDKSRWQQGNVFSCSVMHEALHNHYTQKSLSLSPGGSPLGLAGSGRSDNQGSGANWVNVISDLKKIEDLIQSMHIDATLYTESDVHPSCKVTAMKCFLLELQVISLESGDASIHDTVENLIILANNSLSSNGNVTESGCKECEELEEKNIKEFLQSFVHIVQMFINTAGGSGGSGGSGGSITCPPPMSVEHADIWVKSYSLYSRERYICNSGFKRKAGTSSLTECVLNKATNVAHWTTPSLKCIRDPALVHQRPAPPS

SEQ ID NO: 427 - protein, 451 aa, Artificial Sequence
  Made in lab - Fc-ILR fusion protein construct
EPKSSDKTHTCPPCPAPELLGGPSVFLFPPKPKDTLMISRTPEVTCVVVDVSHEDPEVKFNWYVDGVEVHNAKTKPREEQYNSTYRVVSVLTVLHQDWLNGKEYKCKVSNKALPAPIEKTISKAKGQPREPQVYTLPPSREEMTKNQVSLTCLVKGFYPSDIAVEWESNGQPENNYKTTPPVLDSDGSFFLYSKLTVDKSRWQQGNVFSCSVMHEALHNHYTQKSLSLSPGGSPLGLAGSGRSDNQGSGANWVNVISDLKKIEDLIQSMHIDATLYTESDVHPSCKVTAMKCFLLELQVISLESGDASIHDTVENLIILANNSLSSNGNVTESGCKECEELEEKNIKEFLQSFVHIVQMFINTAGGSGGSGGSITCPPPMSVEHADIWVKSYSLYSRERYICNSGFKRKAGTSSLTECVLNKATNVAHWTTPSLKCIRDPALVHQRPAPPS

SEQ ID NO: 428 - protein, 448 aa, Artificial Sequence
  Made in lab - Fc-ILR fusion protein construct
EPKSSDKTHTCPPCPAPELLGGPSVFLFPPKPKDTLMISRTPEVTCVVVDVSHEDPEVKFNWYVDGVEVHNAKTKPREEQYNSTYRVVSVLTVLHQDWLNGKEYKCKVSNKALPAPIEKTISKAKGQPREPQVYTLPPSREEMTKNQVSLTCLVKGFYPSDIAVEWESNGQPENNYKTTPPVLDSDGSFFLYSKLTVDKSRWQQGNVFSCSVMHEALHNHYTQKSLSLSPGGSPLGLAGSGRSDNQGSGANWVNVISDLKKIEDLIQSMHIDATLYTESDVHPSCKVTAMKCFLLELQVISLESGDASIHDTVENLIILANNSLSSNGNVTESGCKECEELEEKNIKEFLQSFVHIVQMFINTAGGSGGSITCPPPMSVEHADIWVKSYSLYSRERYICNSGFKRKAGTSSLTECVLNKATNVAHWTTPSLKCIRDPALVHQRPAPPS

SEQ ID NO: 429 - protein, 445 aa, Artificial Sequence
  Made in lab - Fc-ILR fusion protein construct
EPKSSDKTHTCPPCPAPELLGGPSVFLFPPKPKDTLMISRTPEVTCVVVDVSHEDPEVKFNWYVDGVEVHNAKTKPREEQYNSTYRVVSVLTVLHQDWLNGKEYKCKVSNKALPAPIEKTISKAKGQPREPQVYTLPPSREEMTKNQVSLTCLVKGFYPSDIAVEWESNGQPENNYKTTPPVLDSDGSFFLYSKLTVDKSRWQQGNVFSCSVMHEALHNHYTQKSLSLSPGGSPLGLAGSGRSDNQGSGANWVNVISDLKKIEDLIQSMHIDATLYTESDVHPSCKVTAMKCFLLELQVISLESGDASIHDTVENLIILANNSLSSNGNVTESGCKECEELEEKNIKEFLQSFVHIVQMFINTAGGSITCPPPMSVEHADIWVKSYSLYSRERYICNSGFKRKAGTSSLTECVLNKATNVAHWTTPSLKCIRDPALVHQRPAPPS

SEQ ID NO: 430 - protein, 238 aa, Artificial Sequence
  Made in Lab - cleavage product of Fc-IRL fusion protein construct
EPKSSDKTHTCPPCPAPELLGGPSVFLFPPKPKDTLMISRTPEVTCVVVDVSHEDPEVKFNWYVDGVEVHNAKTKPREEQYNSTYRVVSVLTVLHQDWLNGKEYKCKVSNKALPAPIEKTISKAKGQPREPQVYTLPPSREEMTKNQVSLTCLVKGFYPSDIAVEWESNGQPENNYKTTPPVLDSDGSFFLYSKLTVDKSRWQQGNVFSCSVMHEALHNHYTQKSLSLSPGKGSLSGR

SEQ ID NO: 431 - protein, 213 aa, Artificial Sequence
  Made in Lab - cleavage product of Fc-IRL fusion protein construct
SDNQGSNWVNVISDLKKIEDLIQSMHIDATLYTESDVHPSCKVTAMKCFLLELQVISLESGDASIHDTVENLIILANNSLSSNGNVTESGCKECEELEEKNIKEFLQSFVHIVQMFINTSGGSGGSGGSGGSGGSITCPPPMSVEHADIWVKSYSLYSRERYICNSGFKRKAGTSSLTECVLNKATNVAHWTTPSLKCIRDPALVHQRPAPPS

SEQ ID NO: 432 - protein, 451 aa, Artificial Sequence; identical to SEQ ID NO: 358
  Made in Lab - cleavage product of Fc-IRL fusion protein construct

SEQ ID NO: 433 - protein, 238 aa, Artificial Sequence; identical to SEQ ID NO: 430
  Made in Lab - cleavage product of Fc-IRL fusion protein construct

SEQ ID NO: 434 - protein, 213 aa, Artificial Sequence; identical to SEQ ID NO: 431
  Made in Lab - cleavage product of Fc-IRL fusion protein construct

SEQ ID NO: 435 - protein, 241 aa, Artificial Sequence
  Made in Lab - cleavage product of Fc-IRL fusion protein construct
EPKSSDKTHTCPPCPAPELLGGPSVFLFPPKPKDTLMISRTPEVTCVVVDVSHEDPEVKFNWYVDGVEVHNAKTKPREEQYNSTYRVVSVLTVLHQDWLNGKEYKCKVSNKALPAPIEKTISKAKGQPREPQVYTLPPSREEMTKNQVSLTCLVKGFYPSDIAVEWESNGQPENNYKTTPPVLDSDGSFFLYSKLTVDKSRWQQGNVFSCSVMHEALHNHYTQKSLSLSPGKGSLSGRSDN

SEQ ID NO: 436 - protein, 210 aa, Artificial Sequence
  Made in Lab - cleavage product of Fc-IRL fusion protein construct
QGSNWVNVISDLKKIEDLIQSMHIDATLYTESDVHPSCKVTAMKCFLLELQVISLESGDASIHDTVENLIILANNSLSSNGNVTESGCKECEELEEKNIKEFLQSFVHIVQMFINTSGGSGGSGGSGGSGGSITCPPPMSVEHADIWVKSYSLYSRERYICNSGFKRKAGTSSLTECVLNKATNVAHWTTPSLKCIRDPALVHQRPAPPS

SEQ ID NO: 437 - protein, 451 aa, Artificial Sequence; identical to SEQ ID NO: 358
  Made in Lab - cleavage product of Fc-IRL fusion protein construct

SEQ ID NO: 438 - protein, 241 aa, Artificial Sequence; identical to SEQ ID NO: 435
  Made in Lab - cleavage product of Fc-IRL fusion protein construct

SEQ ID NO: 439 - protein, 210 aa, Artificial Sequence; identical to SEQ ID NO: 436
  Made in Lab - cleavage product of Fc-IRL fusion protein construct

SEQ ID NO: 440 - protein, 241 aa, Artificial Sequence
  Made in Lab - cleavage product of Fc-IRL fusion protein construct
EPKSSDKTHTCPPCPAPELLGGPSVFLFPPKPKDTLMISRTPEVTCVVVDVSHEDPEVKFNWYVDGVEVHNAKTKPREEQYNSTYRVVSVLTVLHQDWLNGKEYKCKVSNKALPAPIEKTISKAKGQPREPQVYTLPPSREEMTKNQVSLTCLVKGFYPSDIAVEWESNGQPENNYKTTPPVLDSDGSFFLYSKLTVDKSRWQQGNVFSCSVMHEALHNHYTQKSLSLSPGKPLGLAGSGR

SEQ ID NO: 441 - protein, 211 aa, Artificial Sequence
  Made in Lab - cleavage product of Fc-IRL fusion protein construct
SDNRNWVNVISDLKKIEDLIQSMHIDATLYTESDVHPSCKVTAMKCFLLELQVISLESGDASIHDTVENLIILANNSLSSNGNVTESGCKECEELEEKNIKEFLQSFVHIVQMFINTAGGSGGSGGSGGSGGSITCPPPMSVEHADIWVKSYSLYSRERYICNSGFKRKAGTSSLTECVLNKATNVAHWTTPSLKCIRDPALVHQRPAPPS

SEQ ID NO: 442 - protein, 452 aa, Artificial Sequence; identical to SEQ ID NO: 384
  Made in Lab - cleavage product of Fc-IRL fusion protein construct

SEQ ID NO: 443 - protein, 241 aa, Artificial Sequence; identical to SEQ ID NO: 440
  Made in Lab - cleavage product of Fc-IRL fusion protein construct

SEQ ID NO: 444 - protein, 211 aa, Artificial Sequence; identical to SEQ ID NO: 441
  Made in Lab - cleavage product of Fc-IRL fusion protein construct

SEQ ID NO: 445 - protein, 235 aa, Artificial Sequence
  Made in Lab - cleavage product of Fc-IRL fusion protein construct
EPKSSDKTHTCPPCPAPELLGGPSVFLFPPKPKDTLMISRTPEVTCVVVDVSHEDPEVKFNWYVDGVEVHNAKTKPREEQYNSTYRVVSVLTVLHQDWLNGKEYKCKVSNKALPAPIEKTISKAKGQPREPQVYTLPPSREEMTKNQVSLTCLVKGFYPSDIAVEWESNGQPENNYKTTPPVLDSDGSFFLYSKLTVDKSRWQQGNVFSCSVMHEALHNHYTQKSLSLSPGKPLG

SEQ ID NO: 446 - protein, 217 aa, Artificial Sequence
  Made in Lab - cleavage product of Fc-IRL fusion protein construct
LAGSGRSDNRNWVNVISDLKKIEDLIQSMHIDATLYTESDVHPSCKVTAMKCFLLELQVISLESGDASIHDTVENLIILANNSLSSNGNVTESGCKECEELEEKNIKEFLQSFVHIVQMFINTAGGSGGSGGSGGSGGSITCPPPMSVEHADIWVKSYSLYSRERYICNSGFKRKAGTSSLTECVLNKATNVAHWTTPSLKCIRDPALVHQRPAPPS

SEQ ID NO: 447 - protein, 452 aa, Artificial Sequence; identical to SEQ ID NO: 384
  Made in Lab - cleavage product of Fc-IRL fusion protein construct

SEQ ID NO: 448 - protein, 235 aa, Artificial Sequence; identical to SEQ ID NO: 445
  Made in Lab - cleavage product of Fc-IRL fusion protein construct

SEQ ID NO: 449 - protein, 217 aa, Artificial Sequence; identical to SEQ ID NO: 446
  Made in Lab - cleavage product of Fc-IRL fusion protein construct

SEQ ID NO: 450 - protein, 368 aa, Artificial Sequence
  Made in Lab - cleavage product of Fc-IRL fusion protein construct
EPKSSDKTHTCPPCPAPELLGGPSVFLFPPKPKDTLMISRTPEVTCVVVDVSHEDPEVKFNWYVDGVEVHNAKTKPREEQYNSTYRVVSVLTVLHQDWLNGKEYKCKVSNKALPAPIEKTISKAKGQPREPQVYTLPPSREEMTKNQVSLTCLVKGFYPSDIAVEWESNGQPENNYKTTPPVLDSDGSFFLYSKLTVDKSRWQQGNVFSCSVMHEALHNHYTQKSLSLSPGGGGSKTHTGGGSNWVNVISDLKKIEDLIQSMHIDATLYTESDVHPSCKVTAMKCFLLELQVISLESGDASIHDTVENLIILANNSLSSNGNVTESGCKECEELEEKNIKEFLQSFVHIVQMFINTAGSPLGLAGSGR

SEQ ID NO: 451 - protein, 84 aa, Artificial Sequence
  Made in Lab - cleavage product of Fc-IRL fusion protein construct
SDNRGSITCPPPMSVEHADIWVKSYSLYSRERYICNSGFKRKAGTSSLTECVLNKATNVAHWTTPSLKCIRDPALVHQRPAPPS

SEQ ID NO: 452 - protein, 452 aa, Artificial Sequence; identical to SEQ ID NO: 387
  Made in Lab - cleavage product of Fc-IRL fusion protein construct

SEQ ID NO: 453 - protein, 368 aa, Artificial Sequence; identical to SEQ ID NO: 450
  Made in Lab - cleavage product of Fc-IRL fusion protein construct

SEQ ID NO: 454 - protein, 84 aa, Artificial Sequence; identical to SEQ ID NO: 451
  Made in Lab - cleavage product of Fc-IRL fusion protein construct

SEQ ID NO: 455 - protein, 362 aa, Artificial Sequence
  Made in Lab - cleavage product of Fc-IRL fusion protein construct
EPKSSDKTHTCPPCPAPELLGGPSVFLFPPKPKDTLMISRTPEVTCVVVDVSHEDPEVKFNWYVDGVEVHNAKTKPREEQYNSTYRVVSVLTVLHQDWLNGKEYKCKVSNKALPAPIEKTISKAKGQPREPQVYTLPPSREEMTKNQVSLTCLVKGFYPSDIAVEWESNGQPENNYKTTPPVLDSDGSFFLYSKLTVDKSRWQQGNVFSCSVMHEALHNHYTQKSLSLSPGGGGSKTHTGGGSNWVNVISDLKKIEDLIQSMHIDATLYTESDVHPSCKVTAMKCFLLELQVISLESGDASIHDTVENLIILANNSLSSNGNVTESGCKECEELEEKNIKEFLQSFVHIVQMFINTAGSPLG

SEQ ID NO: 456 - protein, 90 aa, Artificial Sequence
  Made in Lab - cleavage product of Fc-IRL fusion protein construct
LAGSGRSDNRGSITCPPPMSVEHADIWVKSYSLYSRERYICNSGFKRKAGTSSLTECVLNKATNVAHWTTPSLKCIRDPALVHQRPAPPS

SEQ ID NO: 457 - protein, 452 aa, Artificial Sequence; identical to SEQ ID NO: 387
  Made in Lab - cleavage product of Fc-IRL fusion protein construct

SEQ ID NO: 458 - protein, 362 aa, Artificial Sequence; identical to SEQ ID NO: 455
  Made in Lab - cleavage product of Fc-IRL fusion protein construct

SEQ ID NO: 459 - protein, 90 aa, Artificial Sequence; identical to SEQ ID NO: 456
  Made in Lab - cleavage product of Fc-IRL fusion protein construct

SEQ ID NO: 460 - protein, 240 aa, Artificial Sequence
  Made in Lab - cleavage product of Fc-IRL fusion protein construct
EPKSSDKTHTCPPCPAPELLGGPSVFLFPPKPKDTLMISRTPEVTCVVVDVSHEDPEVKFNWYVDGVEVHNAKTKPREEQYNSTYRVVSVLTVLHQDWLNGKEYKCKVSNKALPAPIEKTISKAKGQPREPQVYTLPPSREEMTKNQVSLTCLVKGFYPSDIAVEWESNGQPENNYKTTPPVLDSDGSFFLYSKLTVDKSRWQQGNVFSCSVMHEALHNHYTQKSLSLSPGPLGLAGSGR

SEQ ID NO: 461 - protein, 213 aa, Artificial Sequence
  Made in Lab - cleavage product of Fc-IRL fusion protein construct
SDNQGANWVNVISDLKKIEDLIQSMHIDATLYTESDVHPSCKVTAMKCFLLELQVISLESGDASIHDTVENLIILANNSLSSNGNVTESGCKECEELEEKNIKEFLQSFVHIVQMFINTAGGSGGSGGSGGSGGSITCPPPMSVEHADIWVKSYSLYSRERYICNSGFKRKAGTSSLTECVLNKATNVAHWTTPSLKCIRDPALVHQRPAPPS

SEQ ID NO: 462 - protein, 453 aa, Artificial Sequence; identical to SEQ ID NO: 397
  Made in Lab - cleavage product of Fc-IRL fusion protein construct

SEQ ID NO: 463 - protein, 240 aa, Artificial Sequence; identical to SEQ ID NO: 460
  Made in Lab - cleavage product of Fc-IRL fusion protein construct

SEQ ID NO: 464 - protein, 213 aa, Artificial Sequence; identical to SEQ ID NO: 461
  Made in Lab - cleavage product of Fc-IRL fusion protein construct

SEQ ID NO: 465 - protein, 234 aa, Artificial Sequence
  Made in Lab - cleavage product of Fc-IRL fusion protein construct
EPKSSDKTHTCPPCPAPELLGGPSVFLFPPKPKDTLMISRTPEVTCVVVDVSHEDPEVKFNWYVDGVEVHNAKTKPREEQYNSTYRVVSVLTVLHQDWLNGKEYKCKVSNKALPAPIEKTISKAKGQPREPQVYTLPPSREEMTKNQVSLTCLVKGFYPSDIAVEWESNGQPENNYKTTPPVLDSDGSFFLYSKLTVDKSRWQQGNVFSCSVMHEALHNHYTQKSLSLSPGPLG

SEQ ID NO: 466 - protein, 219 aa, Artificial Sequence
  Made in Lab - cleavage product of Fc-IRL fusion protein construct
LAGSGRSDNQGANWVNVISDLKKIEDLIQSMHIDATLYTESDVHPSCKVTAMKCFLLELQVISLESGDASIHDTVENLIILANNSLSSNGNVTESGCKECEELEEKNIKEFLQSFVHIVQMFINTAGGSGGSGGSGGSGGSITCPPPMSVEHADIWVKSYSLYSRERYICNSGFKRKAGTSSLTECVLNKATNVAHWTTPSLKCIRDPALVHQRPAPPS

SEQ ID NO: 467 - protein, 453 aa, Artificial Sequence; identical to SEQ ID NO: 397
  Made in Lab - cleavage product of Fc-IRL fusion protein construct

SEQ ID NO: 468 - protein, 234 aa, Artificial Sequence; identical to SEQ ID NO: 465
  Made in Lab - cleavage product of Fc-IRL fusion protein construct

SEQ ID NO: 469 - protein, 219 aa, Artificial Sequence; identical to SEQ ID NO: 466
  Made in Lab - cleavage product of Fc-IRL fusion protein construct

SEQ ID NO: 470 - protein, 362 aa, Artificial Sequence
  Made in Lab - cleavage product of Fc-IRL fusion protein construct
EPKSSDKTHTCPPCPAPELLGGPSVFLFPPKPKDTLMISRTPEVTCVVVDVSHEDPEVKFNWYVDGVEVHNAKTKPREEQYNSTYRVVSVLTVLHQDWLNGKEYKCKVSNKALPAPIEKTISKAKGQPREPQVYTLPPSREEMTKNQVSLTCLVKGFYPSDIAVEWESNGQPENNYKTTPPVLDSDGSFFLYSKLTVDKSRWQQGNVFSCSVMHEALHNHYTQKSLSLSPGGGNWVNVISDLKKIEDLIQSMHIDATLYTESDVHPSCKVTAMKCFLLELQVISLESGDASIHDTVENLIILANNSLSSNGNVTESGCKECEELEEKNIKEFLQSFVHIVQMFINTAGGSGGSPLGLAGSGR

SEQ ID NO: 471 - protein, 88 aa, Artificial Sequence
  Made in Lab - cleavage product of Fc-IRL fusion protein construct
SDNQGGSGGAIACPPPMSVEHADIWVKSYSLYSRERYICNSGFKRKAGTSSLTECVLNKATNVAHWTTPSLKCIRDPALVHQRPAPPS

SEQ ID NO: 472 - protein, 450 aa, Artificial Sequence; identical to SEQ ID NO: 412
  Made in Lab - cleavage product of Fc-IRL fusion protein construct

SEQ ID NO: 473 - protein, 362 aa, Artificial Sequence; identical to SEQ ID NO: 470
  Made in Lab - cleavage product of Fc-IRL fusion protein construct

SEQ ID NO: 474 - protein, 88 aa, Artificial Sequence; identical to SEQ ID NO: 471
  Made in Lab - cleavage product of Fc-IRL fusion protein construct

SEQ ID NO: 475 - protein, 356 aa, Artificial Sequence
  Made in Lab - cleavage product of Fc-IRL fusion protein construct
EPKSSDKTHTCPPCPAPELLGGPSVFLFPPKPKDTLMISRTPEVTCVVVDVSHEDPEVKFNWYVDGVEVHNAKTKPREEQYNSTYRVVSVLTVLHQDWLNGKEYKCKVSNKALPAPIEKTISKAKGQPREPQVYTLPPSREEMTKNQVSLTCLVKGFYPSDIAVEWESNGQPENNYKTTPPVLDSDGSFFLYSKLTVDKSRWQQGNVFSCSVMHEALHNHYTQKSLSLSPGGGNWVNVISDLKKIEDLIQSMHIDATLYTESDVHPSCKVTAMKCFLLELQVISLESGDASIHDTVENLIILANNSLSSNGNVTESGCKECEELEEKNIKEFLQSFVHIVQMFINTAGGSGGSPLG

SEQ ID NO: 476 - protein, 94 aa, Artificial Sequence
  Made in Lab - cleavage product of Fc-IRL fusion protein construct
LAGSGRSDNQGGSGGAIACPPPMSVEHADIWVKSYSLYSRERYICNSGFKRKAGTSSLTECVLNKATNVAHWTTPSLKCIRDPALVHQRPAPPS

SEQ ID NO: 477 - protein, 450 aa, Artificial Sequence; identical to SEQ ID NO: 412
  Made in Lab - cleavage product of Fc-IRL fusion protein construct

SEQ ID NO: 478 - protein, 356 aa, Artificial Sequence; identical to SEQ ID NO: 475
  Made in Lab - cleavage product of Fc-IRL fusion protein construct

SEQ ID NO: 479 - protein, 94 aa, Artificial Sequence; identical to SEQ ID NO: 476
  Made in Lab - cleavage product of Fc-IRL fusion protein construct

SEQ ID NO: 480 - protein, 362 aa, Artificial Sequence; identical to SEQ ID NO: 303
  Made in Lab - cleavage product of Fc-IRL fusion protein construct

SEQ ID NO: 481 - protein, 89 aa, Artificial Sequence
  Made in Lab - cleavage product of Fc-IRL fusion protein construct
GGGSGGSGGGSITCPPPMSVEHADIWVKSYSLYSRERYICNSGFKRKAGTSSLTECVLNKCTNVAHWTCPSLKCIRDPALVHQRPAPPS

SEQ ID NO: 482 - protein, 451 aa, Artificial Sequence; identical to SEQ ID NO: 419
  Made in Lab - cleavage product of Fc-IRL fusion protein construct

SEQ ID NO: 483 - protein, 362 aa, Artificial Sequence; identical to SEQ ID NO: 303
  Made in Lab - cleavage product of Fc-IRL fusion protein construct

SEQ ID NO: 484 - protein, 89 aa, Artificial Sequence; identical to SEQ ID NO: 481
  Made in Lab - cleavage product of Fc-IRL fusion protein construct

SEQ ID NO: 485 - protein, 242 aa, Artificial Sequence
  Made in Lab - cleavage product of Fc-IRL fusion protein construct
EPKSSDKTHTCPPCPAPELLGGPSVFLFPPKPKDTLMISRTPEVTCVVVDVSHEDPEVKFNWYVDGVEVHNAKTKPREEQYNSTYRVVSVLTVLHQDWLNGKEYKCKVSNKALPAPIEKTISKAKGQPREPQVYTLPPSREEMTKNQVSLTCLVKGFYPSDIAVEWESNGQPENNYKTTPPVLDSDGSFFLYSKLTVDKSRWQQGNVFSCSVMHEALHNHYTQKSLSLSPGGSPLGLAGSGR

SEQ ID NO: 486 - protein, 203 aa, Artificial Sequence
  Made in Lab - cleavage product of Fc-IRL fusion protein construct
SDNQGSGANWVNVISDLKKIEDLIQSMHIDATLYTESDVHPSCKVTAMKCFLLELQVISLESGDASIHDTVENLIILANNSLSSNGNVTESGCKECEELEEKNIKEFLQSFVHIVQMFINTAGGSITCPPPMSVEHADIWVKSYSLYSRERYICNSGFKRKAGTSSLTECVLNKATNVAHWTTPSLKCIRDPALVHQRPAPPS

SEQ ID NO: 487 - protein, 445 aa, Artificial Sequence; identical to SEQ ID NO: 429
  Made in Lab - cleavage product of Fc-IRL fusion protein construct

SEQ ID NO: 488 - protein, 242 aa, Artificial Sequence; identical to SEQ ID NO: 485
  Made in Lab - cleavage product of Fc-IRL fusion protein construct

SEQ ID NO: 489 - protein, 203 aa, Artificial Sequence; identical to SEQ ID NO: 486
  Made in Lab - cleavage product of Fc-IRL fusion protein construct

SEQ ID NO: 490 - protein, 236 aa, Artificial Sequence
  Made in Lab - cleavage product of Fc-IRL fusion protein construct
EPKSSDKTHTCPPCPAPELLGGPSVFLFPPKPKDTLMISRTPEVTCVVVDVSHEDPEVKFNWYVDGVEVHNAKTKPREEQYNSTYRVVSVLTVLHQDWLNGKEYKCKVSNKALPAPIEKTISKAKGQPREPQVYTLPPSREEMTKNQVSLTCLVKGFYPSDIAVEWESNGQPENNYKTTPPVLDSDGSFFLYSKLTVDKSRWQQGNVFSCSVMHEALHNHYTQKSLSLSPGGSPLG

SEQ ID NO: 491 - protein, 209 aa, Artificial Sequence
  Made in Lab - cleavage product of Fc-IRL fusion protein construct
LAGSGRSDNQGSGANWVNVISDLKKIEDLIQSMHIDATLYTESDVHPSCKVTAMKCFLLELQVISLESGDASIHDTVENLIILANNSLSSNGNVTESGCKECEELEEKNIKEFLQSFVHIVQMFINTAGGSITCPPPMSVEHADIWVKSYSLYSRERYICNSGFKRKAGTSSLTECVLNKATNVAHWTTPSLKCIRDPALVHQRPAPPS

SEQ ID NO: 492 - protein, 445 aa, Artificial Sequence; identical to SEQ ID NO: 429
  Made in Lab - cleavage product of Fc-IRL fusion protein construct

SEQ ID NO: 493 - protein, 236 aa, Artificial Sequence; identical to SEQ ID NO: 490
  Made in Lab - cleavage product of Fc-IRL fusion protein construct

SEQ ID NO: 494 - protein, 209 aa, Artificial Sequence; identical to SEQ ID NO: 491
  Made in Lab - cleavage product of Fc-IRL fusion protein construct

SEQ ID NO: 495 - protein, 670 aa, Artificial Sequence
  Made in Lab - cleavage product of Fc-IRL fusion protein construct
EVQLVQSGAEVKKPGESLKISCKGSGYTFTENIIHWVRQMPGKGLEWIGWFHPGSGSIKYNEKFKDQVTISADKSISTAYLQWSSLKASDTAMYFCARHGGTGRGAMDYWGQGTLVTVSSASTKGPSVFPLAPSSKSTSGGTAALGCLVKDYFPEPVTVSWNSGALTSGVHTFPAVLQSSGLYSLSSVVTVPSSSLGTQTYICNVNHKPSNTKVDKKVEPKSCDKTHTCPPCPAPELLGGPSVFLFPPKPKDTLMISRTPEVTCVVVDVSHEDPEVKFNWYVDGVEVHNAKTKPREEQYNSTYRVVSVLTVLHQDWLNGKEYKCKVSNKALPAPIEKTISKAKGQPREPQVYTLPPSRDELTKNQVSLTCLVKGFYPSDIAVEWESNGQPENNYKTTPPVLDSDGSFFLYSKLTVDKSRWQQGNVFSCSVMHEALHNHYTQKSLSLSPGKPLGLAGSGRSDNRNWVNVISDLKKIEDLIQSMHIDATLYTESDVHPSCKVTAMKCFLLELQVISLESGDASIHDTVENLIILANNSLSSNGNVTESGCKECEELEEKNIKEFLQSFVHIVQMFINTAGGSGGSGGSGGSGGSITCPPPMSVEHADIWVKSYSLYSRERYICNSGFKRKAGTSSLTECVLNKATNVAHWTTPSLKCIRDPALVHQRPAPPS

SEQ ID NO: 496 - protein, 218 aa, Artificial Sequence
  Made in Lab - cleavage product of Fc-IRL fusion protein construct
DIVMTQTPLSLSVTPGQPASISCRASKSVSTSAYSYMHWYLQKPGQSPQLLIYLASNLESGVPDRFSGSGSGTDFTLKISRVEAEDVGVYYCQHSRELPYTFGQGTKLEIKRTVAAPSVFIFPPSDEQLKSGTASVVCLLNNFYPREAKVQWKVDNALQSGNSQESVTEQDSKDSTYSLSSTLTLSKADYEKHKVYACEVTHQGLSSPVTKSFNRGEC

SEQ ID NO: 497 - protein, 669 aa, Artificial Sequence
  Made in Lab - cleavage product of Fc-IRL fusion protein construct
EVQLVQSGAEVKKPGESLKISCKGSGYTFTENIIHWVRQMPGKGLEWIGWFHPGSGSIKYNEKFKDQVTISADKSISTAYLQWSSLKASDTAMYFCARHGGTGRGAMDYWGQGTLVTVSSASTKGPSVFPLAPSSKSTSGGTAALGCLVKDYFPEPVTVSWNSGALTSGVHTFPAVLQSSGLYSLSSVVTVPSSSLGTQTYICNVNHKPSNTKVDKKVEPKSCDKTHTCPPCPAPELLGGPSVFLFPPKPKDTLMISRTPEVTCVVVDVSHEDPEVKFNWYVDGVEVHNAKTKPREEQYNSTYRVVSVLTVLHQDWLNGKEYKCKVSNKALPAPIEKTISKAKGQPREPQVYTLPPSRDELTKNQVSLTCLVKGFYPSDIAVEWESNGQPENNYKTTPPVLDSDGSFFLYSKLTVDKSRWQQGNVFSCSVMHEALHNHYTQKSLSLSPGPLGLAGSGRSDNRNWVNVISDLKKIEDLIQSMHIDATLYTESDVHPSCKVTAMKCFLLELQVISLESGDASIHDTVENLIILANNSLSSNGNVTESGCKECEELEEKNIKEFLQSFVHIVQMFINTAGGSGGSGGSGGSGGSITCPPPMSVEHADIWVKSYSLYSRERYICNSGFKRKAGTSSLTECVLNKATNVAHWTTPSLKCIRDPALVHQRPAPPS

SEQ ID NO: 498 - protein, 218 aa, Artificial Sequence; identical to SEQ ID NO: 496
  Made in Lab - cleavage product of Fc-IRL fusion protein construct

SEQ ID NO: 499 - protein, 668 aa, Artificial Sequence
  Made in Lab - cleavage product of Fc-IRL fusion protein construct
EVQLVQSGAEVKKPGESLKISCKGSGYTFTENIIHWVRQMPGKGLEWIGWFHPGSGSIKYNEKFKDQVTISADKSISTAYLQWSSLKASDTAMYFCARHGGTGRGAMDYWGQGTLVTVSSASTKGPSVFPLAPSSKSTSGGTAALGCLVKDYFPEPVTVSWNSGALTSGVHTFPAVLQSSGLYSLSSVVTVPSSSLGTQTYICNVNHKPSNTKVDKKVEPKSCDKTHTCPPCPAPEAAGGPSVFLFPPKPKDTLMISRTPEVTCVVVDVSHEDPEVKFNWYVDGVEVHNAKTKPREEQYNSTYRVVSVLTVLHQDWLNGKEYKCKVSNKALAAPIEKTISKAKGQPREPQVYTLPPSRDELTKNQVSLTCLVKGFYPSDIAVEWESNGQPENNYKTTPPVLDSDGSFFLYSKLTVDKSRWQQGNVFSCSVMHEALHNHYTQKSLSLSPGGGNWVNVISDLKKIEDLIQSMHIDATLYTESDVHPSCKVTAMKCFLLELQVISLESGDASIHDTVENLIILANNSLSSNGNVTESGCKECEELEEKNIKEFLQSFVHIVQMFINTAGGSGGSPLGLAGSGRSDNQGGSGGAIACPPPMSVEHADIWVKSYSLYSRERYICNSGFKRKAGTSSLTECVLNKATNVAHWTTPSLKCIRDPALVHQRPAPPS

SEQ ID NO: 500 - protein, 218 aa, Artificial Sequence; identical to SEQ ID NO: 496
  Made in Lab - cleavage product of Fc-IRL fusion protein construct

SEQ ID NO: 501 - protein, 668 aa, Artificial Sequence
  Made in Lab - cleavage product of Fc-IRL fusion protein construct
QVQLVQSGAEVKKPGASVKVSCKASGYTFTENIIHWVRQAPGQGLEWMGWFHPGSGSIKYNEKFKDRVTMTADTSTSTVYMELSSLRSEDTAVYYCARHGGTGRGAMDYWGQGTLVTVSSASTKGPSVFPLAPSSKSTSGGTAALGCLVKDYFPEPVTVSWNSGALTSGVHTFPAVLQSSGLYSLSSVVTVPSSSLGTQTYICNVNHKPSNTKVDKKVEPKSCDKTHTCPPCPAPEAAGGPSVFLFPPKPKDTLMISRTPEVTCVVVDVSHEDPEVKFNWYVDGVEVHNAKTKPREEQYNSTYRVVSVLTVLHQDWLNGKEYKCKVSNKALAAPIEKTISKAKGQPREPQVYTLPPSRDELTKNQVSLTCLVKGFYPSDIAVEWESNGQPENNYKTTPPVLDSDGSFFLYSKLTVDKSRWQQGNVFSCSVMHEALHNHYTQKSLSLSPGGGNWVNVISDLKKIEDLIQSMHIDATLYTESDVHPSCKVTAMKCFLLELQVISLESGDASIHDTVENLIILANNSLSSNGNVTESGCKECEELEEKNIKEFLQSFVHIVQMFINTAGGSGGSPLGLAGSGRSDNQGGSGGAIACPPPMSVEHADIWVKSYSLYSRERYICNSGFKRKAGTSSLTECVLNKATNVAHWTTPSLKCIRDPALVHQRPAPPS

SEQ ID NO: 502 - protein, 218 aa, Artificial Sequence
  Made in Lab - cleavage product of Fc-IRL fusion protein construct
DIQMTQSPSSLSASVGDRVTITCRASKSVSTSAYSYMHWYQQKPGKAPKLLIYLASNLESGVPSRFSGSGSGTDFTLTISSLQPEDFATYYCQHSRELPYTFGQGTKLEIKRTVAAPSVFIFPPSDEQLKSGTASVVCLLNNFYPREAKVQWKVDNALQSGNSQESVTEQDSKDSTYSLSSTLTLSKADYEKHKVYACEVTHQGLSSPVTKSFNRGEC

SEQ ID NO: 503 - protein, 665 aa, Artificial Sequence
  Made in Lab - cleavage product of Fc-IRL fusion protein construct
EVQLLESGGGLVQPGGSLRLSCAASGFTFSSYAMSWVRQAPGKGLEWVSAIIGSGASTYYADSVKGRFTISRDNSKNTLYLQMNSLRAEDTAVYYCAKGWFGGFNYWGQGTLVTVSSASTKGPSVFPLAPSSKSTSGGTAALGCLVKDYFPEPVTVSWNSGALTSGVHTFPAVLQSSGLYSLSSVVTVPSSSLGTQTYICNVNHKPSNTKVDKKVEPKSCDKTHTCPPCPAPEAAGGPSVFLFPPKPKDTLMISRTPEVTCVVVDVSHEDPEVKFNWYVDGVEVHNAKTKPREEQYNSTYRVVSVLTVLHQDWLNGKEYKCKVSNKALAAPIEKTISKAKGQPREPQVYTLPPSRDELTKNQVSLTCLVKGFYPSDIAVEWESNGQPENNYKTTPPVLDSDGSFFLYSKLTVDKSRWQQGNVFSCSVMHEALHNHYTQKSLSLSPGGGNWVNVISDLKKIEDLIQSMHIDATLYTESDVHPSCKVTAMKCFLLELQVISLESGDASIHDTVENLIILANNSLSSNGNVTESGCKECEELEEKNIKEFLQSFVHIVQMFINTAGGSGGSPLGLAGSGRSDNQGGSGGAIACPPPMSVEHADIWVKSYSLYSRERYICNSGFKRKAGTSSLTECVLNKATNVAHWTTPSLKCIRDPALVHQRPAPPS

SEQ ID NO: 504 - protein, 215 aa, Artificial Sequence
  Made in Lab - cleavage product of Fc-IRL fusion protein construct
EIVLTQSPGTLSLSPGERATLSCRASQSVTSSYLAWYQQKPGQAPRLLINVGSRRATGIPDRFSGSGSGTDFTLTISRLEPEDFAVYYCQQGIMLPPTFGQGTKVEIKRTVAAPSVFIFPPSDEQLKSGTASVVCLLNNFYPREAKVQWKVDNALQSGNSQESVTEQDSKDSTYSLSSTLTLSKADYEKHKVYACEVTHQGLSSPVTKSFNRGEC

SEQ ID NO: 505 - protein, 668 aa, Artificial Sequence
  Made in Lab - cleavage product of Fc-IRL fusion protein construct
EVQLVQSGAEVKKPGESLKISCKGSGYTFTENIIHWVRQMPGKGLEWIGWFHPGSGSIKYNEKFKDQVTISADKSISTAYLQWSSLKASDTAMYFCARHGGTGRGAMDYWGQGTLVTVSSASTKGPSVFPLAPSSKSTSGGTAALGCLVKDYFPEPVTVSWNSGALTSGVHTFPAVLQSSGLYSLSSVVTVPSSSLGTQTYICNVNHKPSNTKVDKKVEPKSCDKTHTCPPCPAPEAAGGPSVFLFPPKPKDTLMISRTPEVTCVVVDVSHEDPEVKFNWYVDGVEVHNAKTKPREEQYNSTYRVVSVLTVLHQDWLNGKEYKCKVSNKALAAPIEKTISKAKGQPREPQVYTLPPSRDELTKNQVSLTCLVKGFYPSDIAVEWESNGQPENNYKTTPPVLDSDGSFFLYSKLTVDKSRWQQGNVFSCSVMHEALHNHYTQKSLSLSPGGGNWVNVISDLKKIEDLIQSMHIDATLYTESDVHPSCKVTAMKCFLLELQVISLESGDASIHDTVENLIILANNSLSSNGNVTESGCKECEELEEKNIKEFLQSFVHIVQMFINTAGGSGGSPLGLAGSGRSDNHGGSGGAIACPPPMSVEHADIWVKSYSLYSRERYICNSGFKRKAGTSSLTECVLNKATNVAHWTTPSLKCIRDPALVHQRPAPPS

SEQ ID NO: 506 - protein, 218 aa, Artificial Sequence; identical to SEQ ID NO: 496
  Made in Lab - cleavage product of Fc-IRL fusion protein construct

SEQ ID NO: 507 - protein, 668 aa, Artificial Sequence
  Made in Lab - cleavage product of Fc-IRL fusion protein construct
QVQLVQSGAEVKKPGASVKVSCKASGYTFTENIIHWVRQAPGQGLEWMGWFHPGSGSIKYNEKFKDRVTMTADTSTSTVYMELSSLRSEDTAVYYCARHGGTGRGAMDYWGQGTLVTVSSASTKGPSVFPLAPSSKSTSGGTAALGCLVKDYFPEPVTVSWNSGALTSGVHTFPAVLQSSGLYSLSSVVTVPSSSLGTQTYICNVNHKPSNTKVDKKVEPKSCDKTHTCPPCPAPEAAGGPSVFLFPPKPKDTLMISRTPEVTCVVVDVSHEDPEVKFNWYVDGVEVHNAKTKPREEQYNSTYRVVSVLTVLHQDWLNGKEYKCKVSNKALAAPIEKTISKAKGQPREPQVYTLPPSRDELTKNQVSLTCLVKGFYPSDIAVEWESNGQPENNYKTTPPVLDSDGSFFLYSKLTVDKSRWQQGNVFSCSVMHEALHNHYTQKSLSLSPGGGNWVNVISDLKKIEDLIQSMHIDATLYTESDVHPSCKVTAMKCFLLELQVISLESGDASIHDTVENLIILANNSLSSNGNVTESGCKECEELEEKNIKEFLQSFVHIVQMFINTAGGSGGSPLGLAGSGRSDNHGGSGGAIACPPPMSVEHADIWVKSYSLYSRERYICNSGFKRKAGTSSLTECVLNKATNVAHWTTPSLKCIRDPALVHQRPAPPS

SEQ ID NO: 508 - protein, 218 aa, Artificial Sequence; identical to SEQ ID NO: 502
  Made in Lab - cleavage product of Fc-IRL fusion protein construct

SEQ ID NO: 509 - protein, 665 aa, Artificial Sequence
  Made in Lab - cleavage product of Fc-IRL fusion protein construct
EVQLLESGGGLVQPGGSLRLSCAASGFTFSSYAMSWVRQAPGKGLEWVSAIIGSGASTYYADSVKGRFTISRDNSKNTLYLQMNSLRAEDTAVYYCAKGWFGGFNYWGQGTLVTVSSASTKGPSVFPLAPSSKSTSGGTAALGCLVKDYFPEPVTVSWNSGALTSGVHTFPAVLQSSGLYSLSSVVTVPSSSLGTQTYICNVNHKPSNTKVDKKVEPKSCDKTHTCPPCPAPEAAGGPSVFLFPPKPKDTLMISRTPEVTCVVVDVSHEDPEVKFNWYVDGVEVHNAKTKPREEQYNSTYRVVSVLTVLHQDWLNGKEYKCKVSNKALAAPIEKTISKAKGQPREPQVYTLPPSRDELTKNQVSLTCLVKGFYPSDIAVEWESNGQPENNYKTTPPVLDSDGSFFLYSKLTVDKSRWQQGNVFSCSVMHEALHNHYTQKSLSLSPGGGNWVNVISDLKKIEDLIQSMHIDATLYTESDVHPSCKVTAMKCFLLELQVISLESGDASIHDTVENLIILANNSLSSNGNVTESGCKECEELEEKNIKEFLQSFVHIVQMFINTAGGSGGSPLGLAGSGRSDNHGGSGGAIACPPPMSVEHADIWVKSYSLYSRERYICNSGFKRKAGTSSLTECVLNKATNVAHWTTPSLKCIRDPALVHQRPAPPS

SEQ ID NO: 510 - protein, 215 aa, Artificial Sequence; identical to SEQ ID NO: 504
  Made in Lab - cleavage product of Fc-IRL fusion protein construct

SEQ ID NO: 511 - protein, 668 aa, Artificial Sequence
  Made in Lab - cleavage product of Fc-IRL fusion protein construct
EVQLVQSGAEVKKPGESLKISCKGSGYTFTENIIHWVRQMPGKGLEWIGWFHPGSGSIKYNEKFKDQVTISADKSISTAYLQWSSLKASDTAMYFCARHGGTGRGAMDYWGQGTLVTVSSASTKGPSVFPLAPSSKSTSGGTAALGCLVKDYFPEPVTVSWNSGALTSGVHTFPAVLQSSGLYSLSSVVTVPSSSLGTQTYICNVNHKPSNTKVDKKVEPKSCDKTHTCPPCPAPEAAGGPSVFLFPPKPKDTLMISRTPEVTCVVVDVSHEDPEVKFNWYVDGVEVHNAKTKPREEQYNSTYRVVSVLTVLHQDWLNGKEYKCKVSNKALAAPIEKTISKAKGQPREPQVYTLPPSRDELTKNQVSLTCLVKGFYPSDIAVEWESNGQPENNYKTTPPVLDSDGSFFLYSKLTVDKSRWQQGNVFSCSVMHEALHNHYTQKSLSLSPGGGNWVNVISDLKKIEDLIQSMHIDATLYTESDVHPSCKVTAMKCFLLELQVISLESGDASIHDTVENLIILANNSLSSNGNVTESGCAECEELEEKNIKEFLQSFVHIVQMFINTAGGSGGSPLGLAGSGRSDNQGGSGGAIACPPPMSVEHADIWVKSYSLYSRERYICNSGFKRKAGTSSLTECVLNKATNVAHWTTPSLKCIRDPALVHQRPAPPS

SEQ ID NO: 512 - protein, 218 aa, Artificial Sequence; identical to SEQ ID NO: 496
  Made in Lab - cleavage product of Fc-IRL fusion protein construct

SEQ ID NO: 513 - protein, 668 aa, Artificial Sequence
  Made in Lab - cleavage product of Fc-IRL fusion protein construct
EVQLVQSGAEVKKPGESLKISCKGSGYTFTENIIHWVRQMPGKGLEWIGWFHPGSGSIKYNEKFKDQVTISADKSISTAYLQWSSLKASDTAMYFCARHGGTGRGAMDYWGQGTLVTVSSASTKGPSVFPLAPSSKSTSGGTAALGCLVKDYFPEPVTVSWNSGALTSGVHTFPAVLQSSGLYSLSSVVTVPSSSLGTQTYICNVNHKPSNTKVDKKVEPKSCDKTHTCPPCPAPEAAGGPSVFLFPPKPKDTLMISRTPEVTCVVVDVSHEDPEVKFNWYVDGVEVHNAKTKPREEQYNSTYRVVSVLTVLHQDWLNGKEYKCKVSNKALAAPIEKTISKAKGQPREPQVYTLPPSRDELTKNQVSLTCLVKGFYPSDIAVEWESNGQPENNYKTTPPVLDSDGSFFLYSKLTVDKSRWQQGNVFSCSVMHEALHNHYTQKSLSLSPGGGNWVNVISDLKKIEDLIQSMHIDATLYTESDVHPSCKVTAMKCFLLELQVISLESGDASIHDTVENLIILANNSLSSNGNVTESGCRECEELEEKNIKEFLQSFVHIVQMFINTAGGSGGSPLGLAGSGRSDNQGGSGGAIACPPPMSVEHADIWVKSYSLYSRERYICNSGFKRKAGTSSLTECVLNKATNVAHWTTPSLKCIRDPALVHQRPAPPS

SEQ ID NO: 514 - protein, 218 aa, Artificial Sequence; identical to SEQ ID NO: 496
  Made in Lab - cleavage product of Fc-IRL fusion protein construct

SEQ ID NO: 515 - protein, 672 aa, Artificial Sequence
  Made in Lab - cleavage product of Fc-IRL fusion protein construct
QVQLVQSGAEVKKPGASVKVSCKASGYTFTENIIHWVRQAPGQGLEWMGWIHPGSGSIKYAQKLQGRVTMTTDTSTSTAYMELRSLRSDDTAVYYCARHGGTGRGAMDYWGQGTLVTVSSASTKGPSVFPLAPSSKSTSGGTAALGCLVKDYFPEPVTVSWNSGALTSGVHTFPAVLQSSGLYSLSSVVTVPSSSLGTQTYICNVNHKPSNTKVDKKVEPKSCDKTHTCPPCPAPEAAGGPSVFLFPPKPKDTLMISRTPEVTCVVVDVSHEDPEVKFNWYVDGVEVHNAKTKPREEQYNSTYRVVSVLTVLHQDWLNGKEYKCKVSNKALAAPIEKTISKAKGQPREPQVYTLPPSRDELTKNQVSLTCLVKGFYPSDIAVEWESNGQPENNYKTTPPVLDSDGSFFLYSKLTVDKSRWQQGNVFSCSVMHEALHNHYTQKSLSLSPGGGSPLGLAGGGSNWVNVISDLKKIEDLIQSMHIDATLYTESDVHPSCKVTAMKCFLLELQVISLESGDASIHDTVENLIILANNSLSSNGNVTESGCKECEELEEKNIKEFLQSFVHIVQMFINTAGGGSGGGSGRSDNQGGGSGIACPPPMSVEHADIWVKSYSLYSRERYICNSGFKRKAGTSSLTECVLNKATNVAHWTTPSLKCIRDPALVHQRPAPPS

SEQ ID NO: 516 - protein, 218 aa, Artificial Sequence
  Made in Lab - cleavage product of Fc-IRL fusion protein construct
EIVLTQSPGTLSLSPGERATLSCRASQSVSTSAYSYMHWYQQKPGQAPRLLIYLASNLESGIPDRFSGSGSGTDFTLTISRLEPEDFAVYYCQQSRELPYTFGQGTKLEIKRTVAAPSVFIFPPSDEQLKSGTASVVCLLNNFYPREAKVQWKVDNALQSGNSQESVTEQDSKDSTYSLSSTLTLSKADYEKHKVYACEVTHQGLSSPVTKSFNRGEC

SEQ ID NO: 517 - protein, 674 aa, Artificial Sequence
  Made in Lab - cleavage product of Fc-IRL fusion protein construct
QVQLVQSGAEVKKPGASVKVSCKASGYTFTENIIHWVRQAPGQGLEWMGWIHPGSGSIKYAQKLQGRVTMTTDTSTSTAYMELRSLRSDDTAVYYCARHGGTGRGAMDYWGQGTLVTVSSASTKGPSVFPLAPSSKSTSGGTAALGCLVKDYFPEPVTVSWNSGALTSGVHTFPAVLQSSGLYSLSSVVTVPSSSLGTQTYICNVNHKPSNTKVDKKVEPKSCDKTHTCPPCPAPEAAGGPSVFLFPPKPKDTLMISRTPEVTCVVVDVSHEDPEVKFNWYVDGVEVHNAKTKPREEQYNSTYRVVSVLTVLHQDWLNGKEYKCKVSNKALAAPIEKTISKAKGQPREPQVYTLPPSRDELTKNQVSLTCLVKGFYPSDIAVEWESNGQPENNYKTTPPVLDSDGSFFLYSKLTVDKSRWQQGNVFSCSVMHEALHNHYTQKSLSLSPGGGSPLGLAGGGSNWVNVISDLKKIEDLIQSMHIDATLYTESDVHPSCKVTAMKCFLLELQVISLESGDASIHDTVENLIILANNSLSSNGNVTESGCKECEELEEKNIKEFLQSFVHIVQMFINTAGGGSGGGSGRSDNQGGGSGGGIACPPPMSVEHADIWVKSYSLYSRERYICNSGFKRKAGTSSLTECVLNKATNVAHWTTPSLKCIRDPALVHQRPAPPS

SEQ ID NO: 518 - protein, 218 aa, Artificial Sequence; identical to SEQ ID NO: 516
  Made in Lab - cleavage product of Fc-IRL fusion protein construct

SEQ ID NO: 519 - protein, 676 aa, Artificial Sequence
  Made in Lab - cleavage product of Fc-IRL fusion protein construct
QVQLVQSGAEVKKPGASVKVSCKASGYTFTENIIHWVRQAPGQGLEWMGWIHPGSGSIKYAQKLQGRVTMTTDTSTSTAYMELRSLRSDDTAVYYCARHGGTGRGAMDYWGQGTLVTVSSASTKGPSVFPLAPSSKSTSGGTAALGCLVKDYFPEPVTVSWNSGALTSGVHTFPAVLQSSGLYSLSSVVTVPSSSLGTQTYICNVNHKPSNTKVDKKVEPKSCDKTHTCPPCPAPEAAGGPSVFLFPPKPKDTLMISRTPEVTCVVVDVSHEDPEVKFNWYVDGVEVHNAKTKPREEQYNSTYRVVSVLTVLHQDWLNGKEYKCKVSNKALAAPIEKTISKAKGQPREPQVYTLPPSRDELTKNQVSLTCLVKGFYPSDIAVEWESNGQPENNYKTTPPVLDSDGSFFLYSKLTVDKSRWQQGNVFSCSVMHEALHNHYTQKSLSLSPGGGSPLGLAGGGSNWVNVISDLKKIEDLIQSMHIDATLYTESDVHPSCKVTAMKCFLLELQVISLESGDASIHDTVENLIILANNSLSSNGNVTESGCKECEELEEKNIKEFLQSFVHIVQMFINTAGGGSGGGSGRSDNQGGGSGGGSGIACPPPMSVEHADIWVKSYSLYSRERYICNSGFKRKAGTSSLTECVLNKATNVAHWTTPSLKCIRDPALVHQRPAPPS

SEQ ID NO: 520 - protein, 218 aa, Artificial Sequence; identical to SEQ ID NO: 516
  Made in Lab - cleavage product of Fc-IRL fusion protein construct

SEQ ID NO: 521 - protein, 673 aa, Artificial Sequence
  Made in Lab - cleavage product of Fc-IRL fusion protein construct
QVQLVQSGAEVKKPGASVKVSCKASGYTFTENIIHWVRQAPGQGLEWMGWIHPGSGSIKYAQKLQGRVTMTTDTSTSTAYMELRSLRSDDTAVYYCARHGGTGRGAMDYWGQGTLVTVSSASTKGPSVFPLAPSSKSTSGGTAALGCLVKDYFPEPVTVSWNSGALTSGVHTFPAVLQSSGLYSLSSVVTVPSSSLGTQTYICNVNHKPSNTKVDKKVEPKSCDKTHTCPPCPAPEAAGGPSVFLFPPKPKDTLMISRTPEVTCVVVDVSHEDPEVKFNWYVDGVEVHNAKTKPREEQYNSTYRVVSVLTVLHQDWLNGKEYKCKVSNKALAAPIEKTISKAKGQPREPQVYTLPPSRDELTKNQVSLTCLVKGFYPSDIAVEWESNGQPENNYKTTPPVLDSDGSFFLYSKLTVDKSRWQQGNVFSCSVMHEALHNHYTQKSLSLSPGGGPLGLAGGNWVNVISDLKKIEDLIQSMHIDATLYTESDVHPSCKVTAMKCFLLELQVISLESGDASIHDTVENLIILANNSLSSNGNVTESGCKECEELEEKNIKEFLQSFVHIVQMFINTAGGGSGGGSGRSDNQGGGSGGGSGIACPPPMSVEHADIWVKSYSLYSRERYICNSGFKRKAGTSSLTECVLNKATNVAHWTTPSLKCIRDPALVHQRPAPPS

SEQ ID NO: 522 - protein, 218 aa, Artificial Sequence; identical to SEQ ID NO: 516
  Made in Lab - cleavage product of Fc-IRL fusion protein construct

SEQ ID NO: 523 - protein, 676 aa, Artificial Sequence
  Made in Lab - cleavage product of Fc-IRL fusion protein construct
QVQLVQSGAEVKKPGASVKVSCKASGYTFTENIIHWVRQAPGQGLEWMGWIHPGSGSIKYAQKLQGRVTMTTDTSTSTAYMELRSLRSDDTAVYYCARHGGTGRGAMDYWGQGTLVTVSSASTKGPSVFPLAPSSKSTSGGTAALGCLVKDYFPEPVTVSWNSGALTSGVHTFPAVLQSSGLYSLSSVVTVPSSSLGTQTYICNVNHKPSNTKVDKKVEPKSCDKTHTCPPCPAPEAAGGPSVFLFPPKPKDTLMISRTPEVTCVVVDVSHEDPEVKFNWYVDGVEVHNAKTKPREEQYNSTYRVVSVLTVLHQDWLNGKEYKCKVSNKALAAPIEKTISKAKGQPREPQVYTLPPSRDELTKNQVSLTCLVKGFYPSDIAVEWESNGQPENNYKTTPPVLDSDGSFFLYSKLTVDKSRWQQGNVFSCSVMHEALHNHYTQKSLSLSPGGGSGGSGGSGGSNWVNVISDLKKIEDLIQSMHIDATLYTESDVHPSCKVTAMKCFLLELQVISLESGDASIHDTVENLIILANNSLSSNGNVTESGCKECEELEEKNIKEFLQSFVHIVQMFINTAGGGSGGGSGRSDNQGGGSGGGSGIACPPPMSVEHADIWVKSYSLYSRERYICNSGFKRKAGTSSLTECVLNKATNVAHWTTPSLKCIRDPALVHQRPAPPS

SEQ ID NO: 524 - protein, 218 aa, Artificial Sequence; identical to SEQ ID NO: 516
  Made in Lab - cleavage product of Fc-IRL fusion protein construct

SEQ ID NO: 525 - protein, 459 aa, Artificial Sequence
  Made in Lab - cleavage product of Fc-IRL fusion protein construct
EVQLVQSGAEVKKPGESLKISCKGSGYTFTENIIHWVRQMPGKGLEWIGWFHPGSGSIKYNEKFKDQVTISADKSISTAYLQWSSLKASDTAMYFCARHGGTGRGAMDYWGQGTLVTVSSASTKGPSVFPLAPSSKSTSGGTAALGCLVKDYFPEPVTVSWNSGALTSGVHTFPAVLQSSGLYSLSSVVTVPSSSLGTQTYICNVNHKPSNTKVDKKVEPKSCDKTHTCPPCPAPELLGGPSVFLFPPKPKDTLMISRTPEVTCVVVDVSHEDPEVKFNWYVDGVEVHNAKTKPREEQYNSTYRVVSVLTVLHQDWLNGKEYKCKVSNKALPAPIEKTISKAKGQPREPQVYTLPPSRDELTKNQVSLTCLVKGFYPSDIAVEWESNGQPENNYKTTPPVLDSDGSFFLYSKLTVDKSRWQQGNVFSCSVMHEALHNHYTQKSLSLSPGKPLGLAGSGR

SEQ ID NO: 526 - protein, 211 aa, Artificial Sequence; identical to SEQ ID NO: 441
  Made in Lab - cleavage product of Fc-IRL fusion protein construct

SEQ ID NO: 527 - protein, 218 aa, Artificial Sequence; identical to SEQ ID NO: 496
  Made in Lab - cleavage product of Fc-IRL fusion protein construct

SEQ ID NO: 528 - protein, 670 aa, Artificial Sequence; identical to SEQ ID NO: 495
  Made in Lab - cleavage product of Fc-IRL fusion protein construct

SEQ ID NO: 529 - protein, 459 aa, Artificial Sequence; identical to SEQ ID NO: 525
  Made in Lab - cleavage product of Fc-IRL fusion protein construct

SEQ ID NO: 530 - protein, 211 aa, Artificial Sequence; identical to SEQ ID NO: 441
  Made in Lab - cleavage product of Fc-IRL fusion protein construct

SEQ ID NO: 531 - protein, 218 aa, Artificial Sequence; identical to SEQ ID NO: 496
  Made in Lab - cleavage product of Fc-IRL fusion protein construct

SEQ ID NO: 532 - protein, 453 aa, Artificial Sequence
  Made in Lab - cleavage product of Fc-IRL fusion protein construct
EVQLVQSGAEVKKPGESLKISCKGSGYTFTENIIHWVRQMPGKGLEWIGWFHPGSGSIKYNEKFKDQVTISADKSISTAYLQWSSLKASDTAMYFCARHGGTGRGAMDYWGQGTLVTVSSASTKGPSVFPLAPSSKSTSGGTAALGCLVKDYFPEPVTVSWNSGALTSGVHTFPAVLQSSGLYSLSSVVTVPSSSLGTQTYICNVNHKPSNTKVDKKVEPKSCDKTHTCPPCPAPELLGGPSVFLFPPKPKDTLMISRTPEVTCVVVDVSHEDPEVKFNWYVDGVEVHNAKTKPREEQYNSTYRVVSVLTVLHQDWLNGKEYKCKVSNKALPAPIEKTISKAKGQPREPQVYTLPPSRDELTKNQVSLTCLVKGFYPSDIAVEWESNGQPENNYKTTPPVLDSDGSFFLYSKLTVDKSRWQQGNVFSCSVMHEALHNHYTQKSLSLSPGKPLG

SEQ ID NO: 533 - protein, 217 aa, Artificial Sequence; identical to SEQ ID NO: 446
  Made in Lab - cleavage product of Fc-IRL fusion protein construct

SEQ ID NO: 534 - protein, 218 aa, Artificial Sequence; identical to SEQ ID NO: 496
  Made in Lab - cleavage product of Fc-IRL fusion protein construct

SEQ ID NO: 535 - protein, 670 aa, Artificial Sequence; identical to SEQ ID NO: 495
  Made in Lab - cleavage product of Fc-IRL fusion protein construct

SEQ ID NO: 536 - protein, 453 aa, Artificial Sequence; identical to SEQ ID NO: 532
  Made in Lab - cleavage product of Fc-IRL fusion protein construct

SEQ ID NO: 537 - protein, 217 aa, Artificial Sequence; identical to SEQ ID NO: 446
  Made in Lab - cleavage product of Fc-IRL fusion protein construct

SEQ ID NO: 538 - protein, 218 aa, Artificial Sequence; identical to SEQ ID NO: 496
  Made in Lab - cleavage product of Fc-IRL fusion protein construct

SEQ ID NO: 539 - protein, 580 aa, Artificial Sequence
  Made in Lab - cleavage product of Fc-IRL fusion protein construct
EVQLVQSGAEVKKPGESLKISCKGSGYTFTENIIHWVRQMPGKGLEWIGWFHPGSGSIKYNEKFKDQVTISADKSISTAYLQWSSLKASDTAMYFCARHGGTGRGAMDYWGQGTLVTVSSASTKGPSVFPLAPSSKSTSGGTAALGCLVKDYFPEPVTVSWNSGALTSGVHTFPAVLQSSGLYSLSSVVTVPSSSLGTQTYICNVNHKPSNTKVDKKVEPKSCDKTHTCPPCPAPEAAGGPSVFLFPPKPKDTLMISRTPEVTCVVVDVSHEDPEVKFNWYVDGVEVHNAKTKPREEQYNSTYRVVSVLTVLHQDWLNGKEYKCKVSNKALAAPIEKTISKAKGQPREPQVYTLPPSRDELTKNQVSLTCLVKGFYPSDIAVEWESNGQPENNYKTTPPVLDSDGSFFLYSKLTVDKSRWQQGNVFSCSVMHEALHNHYTQKSLSLSPGGGNWVNVISDLKKIEDLIQSMHIDATLYTESDVHPSCKVTAMKCFLLELQVISLESGDASIHDTVENLIILANNSLSSNGNVTESGCKECEELEEKNIKEFLQSFVHIVQMFINTAGGSGGSPLGLAGSGR

SEQ ID NO: 540 - protein, 88 aa, Artificial Sequence; identical to SEQ ID NO: 471
  Made in Lab - cleavage product of Fc-IRL fusion protein construct

SEQ ID NO: 541 - protein, 218 aa, Artificial Sequence; identical to SEQ ID NO: 496
  Made in Lab - cleavage product of Fc-IRL fusion protein construct

SEQ ID NO: 542 - protein, 668 aa, Artificial Sequence; identical to SEQ ID NO: 499
  Made in Lab - cleavage product of Fc-IRL fusion protein construct

SEQ ID NO: 543 - protein, 580 aa, Artificial Sequence; identical to SEQ ID NO: 539
  Made in Lab - cleavage product of Fc-IRL fusion protein construct

SEQ ID NO: 544 - protein, 88 aa, Artificial Sequence; identical to SEQ ID NO: 471
  Made in Lab - cleavage product of Fc-IRL fusion protein construct

SEQ ID NO: 545 - protein, 218 aa, Artificial Sequence; identical to SEQ ID NO: 496
  Made in Lab - cleavage product of Fc-IRL fusion protein construct

SEQ ID NO: 546 - protein, 574 aa, Artificial Sequence
  Made in Lab - cleavage product of Fc-IRL fusion protein construct
EVQLVQSGAEVKKPGESLKISCKGSGYTFTENIIHWVRQMPGKGLEWIGWFHPGSGSIKYNEKFKDQVTISADKSISTAYLQWSSLKASDTAMYFCARHGGTGRGAMDYWGQGTLVTVSSASTKGPSVFPLAPSSKSTSGGTAALGCLVKDYFPEPVTVSWNSGALTSGVHTFPAVLQSSGLYSLSSVVTVPSSSLGTQTYICNVNHKPSNTKVDKKVEPKSCDKTHTCPPCPAPEAAGGPSVFLFPPKPKDTLMISRTPEVTCVVVDVSHEDPEVKFNWYVDGVEVHNAKTKPREEQYNSTYRVVSVLTVLHQDWLNGKEYKCKVSNKALAAPIEKTISKAKGQPREPQVYTLPPSRDELTKNQVSLTCLVKGFYPSDIAVEWESNGQPENNYKTTPPVLDSDGSFFLYSKLTVDKSRWQQGNVFSCSVMHEALHNHYTQKSLSLSPGGGNWVNVISDLKKIEDLIQSMHIDATLYTESDVHPSCKVTAMKCFLLELQVISLESGDASIHDTVENLIILANNSLSSNGNVTESGCKECEELEEKNIKEFLQSFVHIVQMFINTAGGSGGSPLG

SEQ ID NO: 547 - protein, 94 aa, Artificial Sequence; identical to SEQ ID NO: 476
  Made in Lab - cleavage product of Fc-IRL fusion protein construct

SEQ ID NO: 548 - protein, 218 aa, Artificial Sequence; identical to SEQ ID NO: 496
  Made in Lab - cleavage product of Fc-IRL fusion protein construct

SEQ ID NO: 549 - protein, 668 aa, Artificial Sequence; identical to SEQ ID NO: 499
  Made in Lab - cleavage product of Fc-IRL fusion protein construct

SEQ ID NO: 550 - protein, 574 aa, Artificial Sequence; identical to SEQ ID NO: 546
  Made in Lab - cleavage product of Fc-IRL fusion protein construct

SEQ ID NO: 551 - protein, 94 aa, Artificial Sequence; identical to SEQ ID NO: 476
  Made in Lab - cleavage product of Fc-IRL fusion protein construct

SEQ ID NO: 552 - protein, 218 aa, Artificial Sequence; identical to SEQ ID NO: 496
  Made in Lab - cleavage product of Fc-IRL fusion protein construct

SEQ ID NO: 553 - protein, 585 aa, Artificial Sequence
  Made in Lab - cleavage product of Fc-IRL fusion protein construct
QVQLVQSGAEVKKPGASVKVSCKASGYTFTENIIHWVRQAPGQGLEWMGWIHPGSGSIKYAQKLQGRVTMTTDTSTSTAYMELRSLRSDDTAVYYCARHGGTGRGAMDYWGQGTLVTVSSASTKGPSVFPLAPSSKSTSGGTAALGCLVKDYFPEPVTVSWNSGALTSGVHTFPAVLQSSGLYSLSSVVTVPSSSLGTQTYICNVNHKPSNTKVDKKVEPKSCDKTHTCPPCPAPEAAGGPSVFLFPPKPKDTLMISRTPEVTCVVVDVSHEDPEVKFNWYVDGVEVHNAKTKPREEQYNSTYRVVSVLTVLHQDWLNGKEYKCKVSNKALAAPIEKTISKAKGQPREPQVYTLPPSRDELTKNQVSLTCLVKGFYPSDIAVEWESNGQPENNYKTTPPVLDSDGSFFLYSKLTVDKSRWQQGNVFSCSVMHEALHNHYTQKSLSLSPGGGSPLGLAGGGSNWVNVISDLKKIEDLIQSMHIDATLYTESDVHPSCKVTAMKCFLLELQVISLESGDASIHDTVENLIILANNSLSSNGNVTESGCKECEELEEKNIKEFLQSFVHIVQMFINTAGGGSGGGSGR

SEQ ID NO: 554 - protein, 87 aa, Artificial Sequence
  Made in Lab - cleavage product of Fc-IRL fusion protein construct
SDNQGGGSGIACPPPMSVEHADIWVKSYSLYSRERYICNSGFKRKAGTSSLTECVLNKATNVAHWTTPSLKCIRDPALVHQRPAPPS

SEQ ID NO: 555 - protein, 218 aa, Artificial Sequence; identical to SEQ ID NO: 516
  Made in Lab - cleavage product of Fc-IRL fusion protein construct

SEQ ID NO: 556 - protein, 672 aa, Artificial Sequence; identical to SEQ ID NO: 515
  Made in Lab - cleavage product of Fc-IRL fusion protein construct

SEQ ID NO: 557 - protein, 585 aa, Artificial Sequence; identical to SEQ ID NO: 553
  Made in Lab - cleavage product of Fc-IRL fusion protein construct

SEQ ID NO: 558 - protein, 87 aa, Artificial Sequence; identical to SEQ ID NO: 554
  Made in Lab - cleavage product of Fc-IRL fusion protein construct

SEQ ID NO: 559 - protein, 218 aa, Artificial Sequence; identical to SEQ ID NO: 516
  Made in Lab - cleavage product of Fc-IRL fusion protein construct

SEQ ID NO: 560 - protein, 455 aa, Artificial Sequence
  Made in Lab - cleavage product of Fc-IRL fusion protein construct
QVQLVQSGAEVKKPGASVKVSCKASGYTFTENIIHWVRQAPGQGLEWMGWIHPGSGSIKYAQKLQGRVTMTTDTSTSTAYMELRSLRSDDTAVYYCARHGGTGRGAMDYWGQGTLVTVSSASTKGPSVFPLAPSSKSTSGGTAALGCLVKDYFPEPVTVSWNSGALTSGVHTFPAVLQSSGLYSLSSVVTVPSSSLGTQTYICNVNHKPSNTKVDKKVEPKSCDKTHTCPPCPAPEAAGGPSVFLFPPKPKDTLMISRTPEVTCVVVDVSHEDPEVKFNWYVDGVEVHNAKTKPREEQYNSTYRVVSVLTVLHQDWLNGKEYKCKVSNKALAAPIEKTISKAKGQPREPQVYTLPPSRDELTKNQVSLTCLVKGFYPSDIAVEWESNGQPENNYKTTPPVLDSDGSFFLYSKLTVDKSRWQQGNVFSCSVMHEALHNHYTQKSLSLSPGGGSPLG

SEQ ID NO: 561 - protein, 217 aa, Artificial Sequence
  Made in Lab - cleavage product of Fc-IRL fusion protein construct
LAGGGSNWVNVISDLKKIEDLIQSMHIDATLYTESDVHPSCKVTAMKCFLLELQVISLESGDASIHDTVENLIILANNSLSSNGNVTESGCKECEELEEKNIKEFLQSFVHIVQMFINTAGGGSGGGSGRSDNQGGGSGIACPPPMSVEHADIWVKSYSLYSRERYICNSGFKRKAGTSSLTECVLNKATNVAHWTTPSLKCIRDPALVHQRPAPPS

SEQ ID NO: 562 - protein, 218 aa, Artificial Sequence; identical to SEQ ID NO: 516
  Made in Lab - cleavage product of Fc-IRL fusion protein construct

SEQ ID NO: 563 - protein, 672 aa, Artificial Sequence; identical to SEQ ID NO: 515
  Made in Lab - cleavage product of Fc-IRL fusion protein construct

SEQ ID NO: 564 - protein, 455 aa, Artificial Sequence; identical to SEQ ID NO: 560
  Made in Lab - cleavage product of Fc-IRL fusion protein construct

SEQ ID NO: 565 - protein, 217 aa, Artificial Sequence; identical to SEQ ID NO: 561
  Made in Lab - cleavage product of Fc-IRL fusion protein construct

SEQ ID NO: 566 - protein, 218 aa, Artificial Sequence; identical to SEQ ID NO: 516
  Made in Lab - cleavage product of Fc-IRL fusion protein construct

SEQ ID NO: 567 - protein, 455 aa, Artificial Sequence; identical to SEQ ID NO: 560
  Made in Lab - cleavage product of Fc-IRL fusion protein construct

SEQ ID NO: 568 - protein, 130 aa, Artificial Sequence
  Made in Lab - cleavage product of Fc-IRL fusion protein construct
LAGGGSNWVNVISDLKKIEDLIQSMHIDATLYTESDVHPSCKVTAMKCFLLELQVISLESGDASIHDTVENLIILANNSLSSNGNVTESGCKECEELEEKNIKEFLQSFVHIVQMFINTAGGGSGGGSGR

SEQ ID NO: 569 - protein, 87 aa, Artificial Sequence; identical to SEQ ID NO: 554
  Made in Lab - cleavage product of Fc-IRL fusion protein construct

SEQ ID NO: 570 - protein, 218 aa, Artificial Sequence; identical to SEQ ID NO: 516
  Made in Lab - cleavage product of Fc-IRL fusion protein construct

SEQ ID NO: 571 - protein, 672 aa, Artificial Sequence; identical to SEQ ID NO: 515
  Made in Lab - cleavage product of Fc-IRL fusion protein construct

SEQ ID NO: 572 - protein, 455 aa, Artificial Sequence; identical to SEQ ID NO: 560
  Made in Lab - cleavage product of Fc-IRL fusion protein construct

SEQ ID NO: 573 - protein, 130 aa, Artificial Sequence; identical to SEQ ID NO: 568
  Made in Lab - cleavage product of Fc-IRL fusion protein construct

SEQ ID NO: 574 - protein, 87 aa, Artificial Sequence; identical to SEQ ID NO: 554
  Made in Lab - cleavage product of Fc-IRL fusion protein construct

SEQ ID NO: 575 - protein, 218 aa, Artificial Sequence; identical to SEQ ID NO: 516
  Made in Lab - cleavage product of Fc-IRL fusion protein construct

SEQ ID NO: 576 - protein, 672 aa, Artificial Sequence; identical to SEQ ID NO: 515
  Made in Lab - cleavage product of Fc-IRL fusion protein construct

SEQ ID NO: 577 - protein, 585 aa, Artificial Sequence; identical to SEQ ID NO: 553
  Made in Lab - cleavage product of Fc-IRL fusion protein construct

SEQ ID NO: 578 - protein, 87 aa, Artificial Sequence; identical to SEQ ID NO: 554
  Made in Lab - cleavage product of Fc-IRL fusion protein construct

SEQ ID NO: 579 - protein, 218 aa, Artificial Sequence; identical to SEQ ID NO: 516
  Made in Lab - cleavage product of Fc-IRL fusion protein construct

SEQ ID NO: 580 - protein, 672 aa, Artificial Sequence; identical to SEQ ID NO: 515
  Made in Lab - cleavage product of Fc-IRL fusion protein construct

SEQ ID NO: 581 - protein, 455 aa, Artificial Sequence; identical to SEQ ID NO: 560
  Made in Lab - cleavage product of Fc-IRL fusion protein construct

SEQ ID NO: 582 - protein, 217 aa, Artificial Sequence; identical to SEQ ID NO: 561
  Made in Lab - cleavage product of Fc-IRL fusion protein construct

SEQ ID NO: 583 - protein, 218 aa, Artificial Sequence; identical to SEQ ID NO: 516
  Made in Lab - cleavage product of Fc-IRL fusion protein construct

SEQ ID NO: 584 - protein, 455 aa, Artificial Sequence; identical to SEQ ID NO: 560
  Made in Lab - cleavage product of Fc-IRL fusion protein construct

SEQ ID NO: 585 - protein, 217 aa, Artificial Sequence; identical to SEQ ID NO: 561
  Made in Lab - cleavage product of Fc-IRL fusion protein construct

SEQ ID NO: 586 - protein, 585 aa, Artificial Sequence; identical to SEQ ID NO: 553
  Made in Lab - cleavage product of Fc-IRL fusion protein construct

SEQ ID NO: 587 - protein, 87 aa, Artificial Sequence; identical to SEQ ID NO: 554
  Made in Lab - cleavage product of Fc-IRL fusion protein construct

SEQ ID NO: 588 - protein, 218 aa, Artificial Sequence; identical to SEQ ID NO: 516
  Made in Lab - cleavage product of Fc-IRL fusion protein construct

SEQ ID NO: 589 - protein, 455 aa, Artificial Sequence; identical to SEQ ID NO: 560
  Made in Lab - cleavage product of Fc-IRL fusion protein construct

SEQ ID NO: 590 - protein, 217 aa, Artificial Sequence; identical to SEQ ID NO: 561
  Made in Lab - cleavage product of Fc-IRL fusion protein construct

SEQ ID NO: 591 - protein, 455 aa, Artificial Sequence; identical to SEQ ID NO: 560
  Made in Lab - cleavage product of Fc-IRL fusion protein construct

SEQ ID NO: 592 - protein, 130 aa, Artificial Sequence; identical to SEQ ID NO: 568
  Made in Lab - cleavage product of Fc-IRL fusion protein construct

SEQ ID NO: 593 - protein, 87 aa, Artificial Sequence; identical to SEQ ID NO: 554
  Made in Lab - cleavage product of Fc-IRL fusion protein construct

SEQ ID NO: 594 - protein, 218 aa, Artificial Sequence; identical to SEQ ID NO: 516
  Made in Lab - cleavage product of Fc-IRL fusion protein construct

SEQ ID NO: 595 - protein, 585 aa, Artificial Sequence; identical to SEQ ID NO: 553
  Made in Lab - cleavage product of Fc-IRL fusion protein construct

SEQ ID NO: 596 - protein, 87 aa, Artificial Sequence; identical to SEQ ID NO: 554
  Made in Lab - cleavage product of Fc-IRL fusion protein construct

SEQ ID NO: 597 - protein, 455 aa, Artificial Sequence; identical to SEQ ID NO: 560
  Made in Lab - cleavage product of Fc-IRL fusion protein construct

SEQ ID NO: 598 - protein, 130 aa, Artificial Sequence; identical to SEQ ID NO: 568
  Made in Lab - cleavage product of Fc-IRL fusion protein construct

SEQ ID NO: 599 - protein, 87 aa, Artificial Sequence; identical to SEQ ID NO: 554
  Made in Lab - cleavage product of Fc-IRL fusion protein construct

SEQ ID NO: 600 - protein, 218 aa, Artificial Sequence; identical to SEQ ID NO: 516
  Made in Lab - cleavage product of Fc-IRL fusion protein construct

SEQ ID NO: 601 - protein, 585 aa, Artificial Sequence; identical to SEQ ID NO: 553
  Made in Lab - cleavage product of Fc-IRL fusion protein construct

SEQ ID NO: 602 - protein, 87 aa, Artificial Sequence; identical to SEQ ID NO: 554
  Made in Lab - cleavage product of Fc-IRL fusion protein construct

SEQ ID NO: 603 - protein, 218 aa, Artificial Sequence; identical to SEQ ID NO: 516
  Made in Lab - cleavage product of Fc-IRL fusion protein construct

SEQ ID NO: 604 - protein, 455 aa, Artificial Sequence; identical to SEQ ID NO: 560
  Made in Lab - cleavage product of Fc-IRL fusion protein construct

SEQ ID NO: 605 - protein, 217 aa, Artificial Sequence; identical to SEQ ID NO: 561
  Made in Lab - cleavage product of Fc-IRL fusion protein construct

SEQ ID NO: 606 - protein, 218 aa, Artificial Sequence; identical to SEQ ID NO: 516
  Made in Lab - cleavage product of Fc-IRL fusion protein construct

SEQ ID NO: 607 - protein, 585 aa, Artificial Sequence
  Made in Lab - cleavage product of Fc-IRL fusion protein construct
QVQLVQSGAEVKKPGASVKVSCKASGYTFTENIIHWVRQAPGQGLEWMGWIHPGSGSIKYAQKLQGRVTMTTDTSTSTAYMELRSLRSDDTAVYYCARHGGTGRGAMDYWGQGTLVTVSSASTKGPSVFPLAPSSKSTSGGTAALGCLVKDYFPEPVTVSWNSGALTSGVHTFPAVLQSSGLYSLSSVVTVPSSSLGTQTYICNVNHKPSNTKVDKKVEPKSCDKTHTCPPCPAPEAAGGPSVFLFPPKPKDTLMISRTPEVTCVVVDVSHEDPEVKFNWYVDGVEVHNAKTKPREEQYNSTYRVVSVLTVLHQDWLNGKEYKCKVSNKALAAPIEKTISKAKGQPREPQVYTLPPSRDELTKNQVSLTCLVKGFYPSDIAVEWESNGQPENNYKTTPPVLDSDGSFFLYSKLTVDKSRWQQGNVFSCSVMHEALHNHYTQKSLSLSPGGGSGGSGGSGGSNWVNVISDLKKIEDLIQSMHIDATLYTESDVHPSCKVTAMKCFLLELQVISLESGDASIHDTVENLIILANNSLSSNGNVTESGCKECEELEEKNIKEFLQSFVHIVQMFINTAGGGSGGGSGR

SEQ ID NO: 608 - protein, 91 aa, Artificial Sequence
  Made in Lab - cleavage product of Fc-IRL fusion protein construct
SDNQGGGSGGGSGIACPPPMSVEHADIWVKSYSLYSRERYICNSGFKRKAGTSSLTECVLNKATNVAHWTTPSLKCIRDPALVHQRPAPPS

SEQ ID NO: 609 - protein, 218 aa, Artificial Sequence; identical to SEQ ID NO: 516
  Made in Lab - cleavage product of Fc-IRL fusion protein construct

SEQ ID NO: 610 - protein, 676 aa, Artificial Sequence; identical to SEQ ID NO: 523
  Made in Lab - cleavage product of Fc-IRL fusion protein construct

SEQ ID NO: 611 - protein, 585 aa, Artificial Sequence; identical to SEQ ID NO: 607
  Made in Lab - cleavage product of Fc-IRL fusion protein construct

SEQ ID NO: 612 - protein, 91 aa, Artificial Sequence; identical to SEQ ID NO: 608
  Made in Lab - cleavage product of Fc-IRL fusion protein construct

SEQ ID NO: 613 - protein, 218 aa, Artificial Sequence; identical to SEQ ID NO: 516
  Made in Lab - cleavage product of Fc-IRL fusion protein construct

What is claimed is:

1. An activatable proprotein comprising a first polypeptide and a second polypeptide, wherein the first and second polypeptide each comprise a masking moiety operably linked via a first linker on the C-terminus to an IL-15 or variant thereof, wherein the IL-15 or variant thereof is linked via a second linker on the C-terminus to an IL-15Rα or variant thereof, and wherein the masking moiety masks the active portion of the proprotein.

2. The activatable proprotein of claim 1, wherein the first linker on the first or second polypeptide, or on both the first and the second polypeptide is a cleavable linker.

3. The activatable proprotein of any one of claims 1-2, wherein the second linker on the first or second polypeptide, or on both the first and the second polypeptide is a cleavable linker.

4. The activatable proprotein of any one of claims 1-3, wherein the IL-15 or variant thereof and the IL-15Rα or variant thereof in the first polypeptide and the IL-15 or variant thereof and the IL-15Rα or variant thereof in the second polypeptide comprise one or more Cys substitution mutations.

5. The activatable proprotein of claim 4, wherein the IL-15 or variant thereof in the first polypeptide comprising one or more Cys substitution mutations forms a disulfide bond with the IL-15Rα or variant thereof comprising one or more Cys substitution mutations in the second polypeptide, or wherein the IL-15 or variant thereof in the second polypeptide comprising one or more Cys substitution mutations forms a disulfide bond with the IL-15Rα or variant thereof comprising one or more Cys substitution mutations in the first polypeptide.

6. The activatable proprotein of any one of claims 1-5, wherein the proprotein is a dimeric proprotein.

7. The activatable proprotein of claim 6, wherein the dimeric proprotein comprises a first polypeptide and a second polypeptide each comprising from N-terminus to C-terminus the masking moiety linked via the first linker to the IL-15 or variant thereof, wherein the IL-15 or variant thereof is linked via the second linker to the IL-15Rα or variant thereof, and wherein the masking moiety of the first polypeptide forms one or more covalent disulfide bonds or one or more non-covalent bonds with the masking moiety of the second polypeptide.

8. The activatable proprotein of any one of claims 1-7, wherein the masking moiety in the first polypeptide comprises one or more protein domains.

9. The activatable proprotein of any one of claims 1-8, wherein the masking moiety in the second polypeptide comprises one or more protein domains.

10. The activatable proprotein of any one of claims 1-9, wherein the masking moiety in the first polypeptide does not bind to an antigen.

11. The activatable proprotein of any one of claims 1-9, wherein the masking moiety in the first polypeptide binds to an antigen.

12. The activatable proprotein of any one of claims 1-9, wherein the masking moiety in the second polypeptide does not bind to an antigen.

13. The activatable proprotein of any one of claims 1-9, wherein the masking moiety in the second polypeptide binds to an antigen.

14. The activatable proprotein of any one of claims 1-13, wherein the masking moiety in the first polypeptide comprises a CH1, CH2, CH3, CH2CH3, or CH1CH2CH3 domain of an antibody constant (Fc) region.

15. The activatable proprotein of any one of claims 1-14, wherein the masking moiety in the first polypeptide comprises one or more heterodimers of at least two different CH3 variant domains of an antibody constant (Fc) region.

16. The activatable proprotein of any one of claims 1-9 and 11, wherein the masking moiety in the first polypeptide comprises a fusion of an antigen binding domain with a CH1, CH2, CH3, CH2CH3, or CH1CH2CH3 domain of an antibody constant (Fc) region.

17. The activatable proprotein of any one of claims 1-13, wherein the masking moiety in the second polypeptide comprises a CH1, CH2, CH3, CH2CH3, or CH1CH2CH3 domain of an antibody constant (Fc) region.

18. The activatable proprotein of any one of claims 1-13 or 17, wherein the masking moiety in the second polypeptide comprises one or more heterodimers of at least two different CH3 variant domains of an antibody constant (Fc) region.

19. The activatable proprotein of any one of claims 1-9 and 13, wherein the masking moiety in the second polypeptide comprises a fusion of an antigen binding domain with a CH1, CH2, CH3, CH2CH3, or CH1CH2CH3 domain of an antibody constant (Fc) region.

20. The activatable proprotein of any one of claims 14-19, wherein the antibody Fc region is from a immunoglobulin class selected from IgG1, IgG2, IgG3, IgG4, IgD, IgA, or IgM.

21. The activatable proprotein of any one of claims 10 or 12, wherein the masking moiety comprises a constant domain of an antibody light chain (CL), and wherein the light chain is a lambda or kappa chain.

22. The activatable proprotein of claim 11, wherein the masking moiety in the first polypeptide comprises an antigen binding domain.

23. The activatable proprotein of claim 13, wherein the masking moiety in the second polypeptide comprises an antigen binding domain.

24. The activatable proprotein of any one of claims 22-23, wherein the antigen binding domain is a variable heavy chain domain (VH), a variable domain from a heavy chain antibody (VHH), or an antigen specific peptide.

25. The activatable proprotein of any one of claims 22-23, wherein the antigen binding domain comprises an antibody light chain (LC) and an antibody heavy chain (HC).

26. The activatable proprotein of any one of claims 2-25, wherein the cleavable linker(s) comprises a cleavage site for a protease.

27. The activatable proprotein of claim 26, wherein the protease is selected from a metalloprotease, a serine protease, a cysteine protease or an aspartic acid protease or any combination thereof.

28. The activatable proprotein of any one of claims 26-27, wherein the protease cleavage site is cleavable by a MMP1, MMP2, MMP3, MMP4, MMP5, MMP6, MMP7, MMP8, MMP9, MMP10, MMP11, MMP12, MMP13, MMP14, TEV, matriptase, uPA, FAP, Legumain, PSA, Kallikrein, Cathepsin A, or a Cathepsin B protease.

29. The activatable proprotein of any one of claims 1-28, wherein the masking moiety in the first and/or second polypeptide prevents binding of a complex of IL-15/IL-15Rα in the first and/or second polypeptide to IL-15Rβ/γC present on the surface of a lymphocyte or a blood cell in vitro or in vivo.

30. The activatable proprotein of any one of claims 2-29, wherein cleavage of the masking moieties in any one of the first and/or second polypeptides in the activatable proprotein leads to partial activation of the activatable proprotein.

31. The activatable proprotein of any one of claims 2-30, wherein cleavage of the masking moiety in both of the first and second polypeptides in the activatable proprotein leads to complete activation of the activatable proprotein into an active complex of IL-15/IL-15Rα or a variant thereof.

32. The activatable proprotein of any one of claims 1-30, wherein the IL-15 or variant thereof is a human IL-15 or an amino acid mutant derived therefrom.

33. The activatable proprotein of any one of claims 1-30, wherein the IL-15Rα or variant thereof comprises a human IL-15Rα, a truncated human IL-15Rα or an amino acid mutant derived from human IL-15Rα.

34. The activatable proprotein of any one of claims 1-31, wherein the IL-15/IL-15Rα or variant thereof comprises a human IL-15 or an amino acid mutant derived therefrom, and a human IL-15Rα, a truncated human IL-15Rα or an amino acid mutant derived from human IL-15Rα.

35. The activatable proprotein of any one of claims 1-34, wherein said activatable proprotein comprises an amino acid sequence set forth in SEQ ID NO: 26 or SEQ ID NO: 228, or a sequence in the Sequence Listing, including variants thereof having at least 80, 85, 90, 95, 97, 98, 99% identity to a sequence in the Sequence Listing.

36. A recombinant nucleic acid molecule encoding the activatable proprotein of any one of claims 1-35.

37. A vector comprising the recombinant nucleic acid molecule of claim 36.

38. A pharmaceutical composition comprising the activatable proprotein of any one of claims 1-35, and a pharmaceutically acceptable carrier.

39. An activatable proprotein comprising a fusion of a first polypeptide and a second polypeptide, wherein the first and second polypeptide each comprise an IL-15 or variant thereof operably linked via a first linker on the C-terminus to an IL-15Rα or variant thereof, wherein the IL-15Rα or variant thereof is linked via a second linker on the C-terminus to a masking moiety present on each of the first and second polypeptides, and wherein the masking moiety masks the active portion of the proprotein.

40. The activatable proprotein of claim 39, wherein the first linker on the first or second polypeptide, or on both the first and the second polypeptide is a cleavable linker.

41. The activatable proprotein of any one of claims 39-40, wherein the second linker on the first or second polypeptide, or on both the first and the second polypeptide is a cleavable linker.

42. The activatable proprotein of any one of claims 40-41, wherein the IL-15 or variant thereof and the IL-15Rα or variant thereof in the first polypeptide and the IL-15 or variant thereof and the IL-15Rα or variant thereof in the second polypeptide comprise one or more Cys substitution mutations.

43. The activatable proprotein of claim 42, wherein the IL-15 or variant thereof in the first polypeptide comprising one or more Cys substitution mutations forms a disulfide bond with the IL-15Rα or variant thereof comprising one or more Cys substitution mutations in the second polypeptide, or wherein the IL-15 or variant thereof in the second polypeptide comprising one or more Cys substitution mutations forms a disulfide bond with the IL-15Rα or variant thereof comprising one or more Cys substitution mutations in the first polypeptide.

44. The activatable proprotein of any one of claims 39-43, wherein the proprotein is a dimeric proprotein.

45. The activatable proprotein of claim 44, wherein the dimeric proprotein comprises a first polypeptide and a second polypeptide each comprising from N-terminus to C-terminus the IL-15 or variant thereof linked via the first linker on the C-terminus to the IL-15Rα or variant thereof, wherein the IL-15Rα or variant thereof is linked via the second linker on the C-terminus to the masking moiety, and wherein the masking moiety of the first polypeptide forms one or more covalent disulfide bonds or non-covalent bonds with the masking moiety of the second polypeptide.

46. The activatable proprotein of any one of claims 39-45, wherein the masking moiety in the first polypeptide comprises one or more protein domains.

47. The activatable proprotein of any one of claims 39-45, wherein the masking moiety in the second polypeptide comprises one or more protein domains.

48. The activatable proprotein of any one of claims 39-47, wherein the masking moiety in the first polypeptide does not bind to an antigen.

49. The activatable proprotein of any one of claims 39-47, wherein the masking moiety in the first polypeptide binds to an antigen.

50. The activatable proprotein of any one of claims 39-47, wherein the masking moiety in the second polypeptide does not bind to an antigen.

51. The activatable proprotein of any one of claims 39-47, wherein the masking moiety in the second polypeptide binds to an antigen.

52. The activatable proprotein of any one of claims 40-52, wherein the masking moiety in the first polypeptide comprises a CH1, CH2, CH3, CH2CH3, or CH1CH2CH3 domain of an antibody constant (Fc) region.

53. The activatable proprotein of any one of claims 39-52, wherein the masking moiety in the first polypeptide comprises a one or more heterodimers of at least two different CH3 variant domains of an antibody constant (Fc) region.

54. The activatable proprotein of any one of claims 39-47 and 49, wherein the masking moiety in the first polypeptide comprises a fusion of an antigen binding domain with a CH1, CH2, CH3, CH2CH3, or CH1CH2CH3 domain of an antibody constant (Fc) region.

55. The activatable proprotein of any one of claims 39-51, wherein the masking moiety in the second polypeptide comprises a CH1, CH2, CH3, CH2CH3, or CH1CH2CH3 domain of an antibody constant (Fc) region.

56. The activatable proprotein of any one of claims 39-51 or 55, wherein the masking moiety in the first polypeptide comprises one or more heterodimers of at least two different CH3 variant domains of an antibody constant (Fc) region.

57. The activatable proprotein of any one of claims 39-51 and 51, wherein the masking moiety in the second polypeptide comprises a fusion of an antigen binding domain with a CH1, CH2, CH3, CH2CH3, or CH1CH2CH3 domain of an antibody constant (Fc) region.

58. The activatable proprotein of any one of claims 52-57, wherein the antibody Fc region is from a immunoglobulin class selected from IgG1, IgG2, IgG3, IgG4, IgD, IgA, or IgM.

59. The activatable proprotein of any one of claims 48 or 50, wherein the masking moiety comprises a constant domain of an antibody light chain (CL), wherein the light chain is a lambda or kappa chain.

60. The activatable proprotein of claim 54, wherein the masking moiety in the first polypeptide comprises an antigen binding domain.

61. The activatable proprotein of claim 57, wherein the masking moiety in the second polypeptide comprises an antigen binding domain.

62. The activatable proprotein of any one of claims 60-61, wherein the antigen binding domain is a variable heavy chain domain (VH), a variable domain from a heavy chain antibody (VHH), or an antigen specific peptide.

63. The activatable proprotein of any one of claims 60-61, wherein the antigen binding domain comprises an antibody light chain (LC) and an antibody heavy chain (HC).

64. The activatable proprotein of any one of claims 40-63, wherein the first linker comprises 26 amino acids.

65. The activatable proprotein of any one of claims 40-64, wherein the cleavable linker(s) comprises a cleavage site for a protease.

66. The activatable proprotein of claim 64, wherein the protease is selected from a metalloprotease, a serine protease, a cysteine protease or an aspartic acid protease or any combination thereof.

67. The activatable proprotein of any one of claims 65-66, wherein the protease cleavage site is cleavable by a MMP1, MMP2, MMP3, MMP4, MMP5, MMP6, MMP7, MMP8, MMP9, MMP10, MMP11, MMP12, MMP13, MMP14, TEV, matriptase, uPA, FAP, Legumain, PSA, Kallikrein, Cathepsin A, or a Cathepsin B protease.

68. The activatable proprotein of any one of claims 39-67, wherein the masking moiety in the first and/or second polypeptide prevents binding of a complex of IL-15/IL-15Rα in the first and/or second polypeptide to IL-15Rβ/γC present on the surface of a lymphocyte or a blood cell in vitro or in vivo.

69. The activatable proprotein of any one of claims 40-68, wherein cleavage of the masking moiety in any one of the first or second polypeptides in the activatable proprotein leads to partial activation of the activatable proprotein.

70. The activatable proprotein of any one of claims 40-69, wherein cleavage of the masking moieties in both of the first and second polypeptides in the activatable proprotein leads to complete activation of the activatable proprotein into an active complex of IL-15/IL-15Rα or a variant thereof.

71. The activatable proprotein of any one of claims 39-69, wherein the IL-15 or variant thereof is a human IL-15 or an amino acid mutant derived therefrom.

72. The activatable proprotein of any one of claims 39-69, wherein the IL-15Rα or variant thereof comprises a human IL-15Rα, a truncated human IL-15Rα or an amino acid mutant derived from human IL-15Rα.

73. The activatable proprotein of any one of claims 39-70, wherein the IL-15/IL-15Rα or variant thereof comprises a human IL-15 or an amino acid mutant derived therefrom, and a human IL-15Rα, a truncated human IL-15Rα or an amino acid mutant derived from human IL-15Rα.

74. The activatable proprotein of any one of claims 39-73, wherein said activatable proprotein comprises an amino acid sequence set forth in SEQ ID NO: 17, or SEQ ID NO: 73, or a sequence in the Sequence Listing, including variants thereof having at least 80, 85, 90, 95, 97, 98, 99% identity to a sequence in the Sequence Listing.

75. A recombinant nucleic acid molecule encoding the activatable proprotein of any one of claims 39-74.

76. A vector comprising the recombinant nucleic acid molecule of claim 75.

77. A pharmaceutical composition comprising the activatable proprotein of any one of claims 39-74, and a pharmaceutically acceptable carrier.

78. A method comprising administering the activatable proprotein of any one of claims 1-35, 39-74 or the pharmaceutical composition of any one of claims 39 or 79 to a subject having a cancer to treat the cancer in the subject, wherein following administration, the activatable proprotein is activated through protease cleavage in a cancerous tissue.

79. A method comprising administering the activatable proprotein of any one of claims 1-35, 39-74 or the pharmaceutical composition of any one of claims 39 or 77 to a subject in need thereof, to elicit or enhance an anti-tumor immune response in the subject, wherein following administration, the activatable proprotein is activated through protease cleavage in the tumor.

80. Use of the activatable proprotein of any one of claims 1-35, 39-74 or the pharmaceutical composition of any one of claims 39 or 77 for treating a cancer in a subject, comprising the step of administering the activatable proprotein or pharmaceutical composition, and wherein following administration, the activatable proprotein is activated through protease cleavage in a cancerous tissue.

81. Use of the activatable proprotein of any one of claims 1-35, 39-74 or the pharmaceutical composition of any one of claims 39 or 77 for eliciting or enhancing an anti-tumor immune response in a subject, comprising the step of administering the activatable proprotein or pharmaceutical composition, and wherein following administration, the activatable proprotein is activated through protease cleavage in a tumor.

82. The method of any one of claims 78-79 or the use of any one of claims 80-81, wherein protease cleavage partially or completely removes the masking moiety in the activatable proprotein such that the IL-15/IL-IL-15Rα complex in the first and the second polypeptide can bind IL-15Rβ/γC present on the surface of a lymphocyte or a blood cell in vitro or in vivo.

83. The method of any one of claims 78-79 or the use of any one of claims 80-81, wherein the cancer is selected from prostate cancer, colon cancer, renal carcinoma, melanoma, lung cancer, breast cancer, thyroid cancer, bladder cancer, gastric and esophageal cancer, pancreatic cancer, liver cancer, brain cancer, head and neck cancer, neuroblastoma, soft tissue carcinoma, lymphoma, leukemia, multiple myeloma, or any metastases therefrom.

84. The activatable proprotein of any one of claims 29 or 68, or the method or use of claim 84, wherein the lymphocyte or a blood cell is a CD4⁺ T cell, a CD8⁺ T cell, a natural killer (NK) cell or B cells.
